(19) United States
(12) Patent Application Publication
(10) Pub. No.: US 2018/0312864 A1
(43) Pub. Date: Nov. 1, 2018

(54) PLANTS HAVING INCREASED TOLERANCE TO HERBICIDES

(71) Applicant: BASF SE, Ludwigshafen (DE)

(72) Inventors: Stefan Tresch, Ludwigshafen (DE); Mihiret Tekeste Sisay, Ludwigshafen (DE); Doreen Schachtschabel, Limburgerhof (DE); Kristin Hanzlik, Limburgerhof (DE); Brigitte Weston, Limburgerhof (DE); Florian Vogt, Ludwigshafen (DE); Danny Geerdink, Ludwigshafen (DE); Jens Lerchl, Limburgerhof (DE)

(73) Assignee: BASF SE, Ludwigshafen (DE)

(21) Appl. No.: 15/769,973

(22) PCT Filed: Oct. 21, 2016
(86) PCT No.: PCT/IB2016/056349

§ 371 Date: Apr. 20, 2018

(30) Foreign Application Priority Data
Oct. 22, 2015 (EP) 15190978.5

(51) Int. Cl. C12N 15/82; C12N 9/10

(52) U.S. Cl. CPC C12N 15/8274; C12N 9/1059

(57) ABSTRACT

Provided is a plant or plant part comprising a polynucleotide encoding a wild type or mutated cellulose synthase (CESA) polypeptide, the expression of the polynucleotide confers to the plant or plant part tolerance to CESA-inhibiting herbicides, such an azines.

### FIELD OF THE INVENTION

[0001] The present invention relates in general to methods for conferring on plants agricultural level tolerance to herbicides. Particularly, the invention refers to plants having an increased tolerance to herbicides, more specifically to herbicides which inhibit the enzyme cellulose synthase (CESA), also known cellulose biosynthesis inhibitors (CBI). More specifically, the present invention relates to methods and plants obtained by mutagenesis and cross-breeding and transformation that have an increased tolerance to herbicides, particularly CESA-inhibiting herbicides.

### BACKGROUND OF THE INVENTION

[0002] Plant cell walls are complex structures composed of high-molecular-weight polysaccharides, proteins, and lignins. Among the wall polysaccharides, cellulose, a hydrogen-bonded β-1,4-linked glucan microfibril, is the main load-bearing wall component and a key precursor for industrial applications. Cellulose is synthesized by large multimeric cellulose synthase (CESA) complexes (E.C.2.4.1.12), tracking along cortical microtubules at the plasma membrane. The only known components of these complexes are the cellulose synthase proteins. Recent studies have identified tentative interaction partners for the CESAs and shown that the migratory patterns of the CESA complexes depend on phosphorylation status (for review see Endler and Persson, Molecular Plant, 2011, Volume 4, Number 2, Pages 199-211, and references contained therein). For example, cotton cellulose synthase genes, termed CESA1 and CESA2, were identified in a collection of expressed sequence tag (EST) sequences on the basis of weak sequence similarity to genes for cellulose synthase from bacteria (Richmond and Somerville. Plant Physiology, 2000, Vol. 124, 495-498; and references contained therein) In addition, the genes were expressed at high levels in cotton fibers at the onset of secondary wall synthesis and a purified fragment of one of the corresponding proteins as shown to bind UDP-Glc, the proposed substrate for cellulose biosynthesis. The conclusion that the cotton CESA genes are cellulose synthases is supported by results obtained with two cellulose-deficient Arabidopsis mutants, rsw1 and irx3 (Richmond and Somerville. Plant Physiology, Vol. 124, 2000, 495-498; and references contained therein). The genes corresponding to the RSW1 and IRX3 loci exhibit a high degree of sequence similarity to the cotton CESA genes and are considered orthologs. Ten full-length CESA genes have been sequenced from Arabidopsis, and there is a genome survey sequence that may indicate one additional family member. Reiterative database searches using the Arabidopsis Rsw1 (AtCESA1) and the cotton CESA polypeptide sequences as the initial query sequences revealed a large superfamily of at least 41 CESA-like genes in Arabidopsis. Based on predicted protein sequences, these genes were grouped into seven clearly distinguishable families (Richmond and Somerville. Plant Physiology, Vol. 124, 2000, 495-498; and references contained therein): the CESA family, which includes RSW1 and IRX3 (AtCESA7), and six families of structurally related genes of unknown function designated as the “cellulose synthase-like” genes (CsIA, CsIB, CsIC, CsID, CsIE, and CsIG).

[0003] WO 2013/142968 describes plant cellulose synthase (CESA) alleles identified by mutagenizing plants and screening said plants with a cellulose biosynthetic inhibitor (CBI). CBIs employed in WO 2013/142968 include dichlobenil, chlorthiamid, isoxaben, flupoxam, and quinclorac, particularly isoxaben or flupoxam (named fpx1-1 to fxp1-3 [CESA3], fxp2-1 to fxp2-3 [CESA1] and ixr1-1 to ixr1-7 [CESA3], ixr2-1 to ixr2-2 [CESA6] mutants of Arabidopsis CESA wildtype enzymes)

[0004] The inventors of the present invention have now surprisingly found that over-expression of new mutant cellulose synthase forms which were not disclosed in WO 2013/142968 confers in plants tolerance/resistance to particular classes of CESA-inhibiting herbicides (cellulose biosynthesis inhibitors; CBIs) as compared to the non-transformed and/or non-mutagenized plants or plant cells, respectively. More specifically, the inventors of the present invention have found that CESA expression confers tolerance/resistance to azines. More specifically, the inventors of the present invention have found that modifications of the N-terminal and or the C-terminal part of CESA proteins confer tolerance/resistance to azines.

[0005] The problem of the present invention can be seen as to the provision of novel traits by identifying target polypeptides, the manipulation of which makes plants tolerant to herbicides.

[0006] Three main strategies are available for making plants tolerant to herbicides, i.e. (1) detoxifying the herbicide with an enzyme which transforms the herbicide, or its active metabolite, into non-toxic products, such as, for example, the enzymes for tolerance to bromoxynil or to basta (EP242236, EP337899); (2) mutating the target enzyme into a functional enzyme which is less sensitive to the herbicide, or to its active metabolite, such as, for example, the enzymes for tolerance to glyphosate (EP293356, Padgette S. R. et al., J. Biol. Chem., 266, 33, 1991); or (3) overexpressing the sensitive enzyme so as to produce quantities of the target enzyme in the plant which are sufficient in relation to the herbicide, in view of the kinetic constants of this enzyme, so as to have enough of the functional enzyme available despite the presence of its inhibitor.

[0007] The problem is solved by the subject-matter of the present invention.

### SUMMARY OF THE INVENTION

[0008] Accordingly, in one aspect, the present invention provides a plant or plant part comprising a polynucleotide encoding a mutated CESA polypeptide, the expression of said polynucleotide confers to the plant or plant part tolerance to CESA-inhibiting herbicides.

[0009] In some aspects, the present invention provides a seed capable of germination into a plant comprising in at least some of its cells a polynucleotide operably linked to a promoter operable in plant cells, the promoter capable of expressing a mutated CESA polypeptide encoded by the polynucleotide, the expression of the mutated CESA polypeptide conferring to the plant tolerance to CESA-inhibiting herbicides.

[0010] In one aspect, the present invention provides a plant cell of or capable of regenerating a plant comprising in at least some of its cells a polynucleotide operably linked to a promoter operable in plant cells, the promoter capable of expressing a mutated CESA polypeptide encoded by the polynucleotide, the expression of the mutated CESA polypeptide conferring to the plant tolerance to CESA-inhibiting herbicides, wherein the plant cell comprises the polynucleotide operably linked to a promoter.

[0011] In another aspect, the present invention provides a plant cell comprising a polynucleotide operably linked to a promoter operable in a cell, the promoter capable of expressing a mutated CESA polypeptide encoded by the polynucleotide, the expression of the mutated CESA polypeptide conferring to the plant tolerance to CESA-inhibiting herbicides.

[0012] In other aspects, the present invention provides a plant product prepared from a plant or plant part comprising in at least some of its cells a polynucleotide operably linked to a promoter operable in plant cells, the promoter capable of expressing a mutated CESA polypeptide encoded by the polynucleotide, the expression of the mutated CESA polypeptide conferring to the plant tolerance to CESA-inhibiting herbicides.

[0013] In some aspects, the present invention provides a progeny or descendant plant derived from a plant comprising in at least some of its cells a polynucleotide operably linked to a promoter operable in plant cells, the promoter capable of expressing a mutated CESA polypeptide encoded by the polynucleotide, wherein the progeny or descendant plant comprises in at least some of its cells the recombinant polynucleotide operably linked to the promoter, the expression of the mutated CESA polypeptide conferring to the progeny or descendant plant tolerance to the CESA-inhibiting herbicides.

[0014] In other aspects, the present invention provides a method for controlling weeds at a locus for growth of a plant, the method comprising: (a) applying an herbicide composition comprising CESA-inhibiting herbicides to the locus; and (b) planting a seed at the locus, wherein the seed is capable of producing a plant that comprises in at least some of its cells a polynucleotide operably linked to a promoter operable in plant cells, the promoter capable of expressing a mutated CESA polypeptide encoded by the polynucleotide, the expression of the mutated CESA polypeptide conferring to the plant tolerance to CESA-inhibiting herbicides.

[0015] In some aspects, the present invention provides a method for controlling weeds at a locus for growth of a plant, the method comprising: applying an herbicidal composition comprising CESA-inhibiting herbicides to the locus; wherein said locus is: (a) a locus that contains: a plant or a seed capable of producing said plant; or (b) a locus that is to be after said applying is made to contain the plant or the seed; wherein the plant or the seed comprises in at least some of its cells a polynucleotide operably linked to a promoter operable in plant cells, the promoter capable of expressing a mutated CESA polypeptide encoded by the polynucleotide, the expression of the mutated CESA polypeptide conferring to the plant tolerance to CESA-inhibiting herbicides.

[0016] In one aspect, step (a) occurs before, after, or concurrently with step (b).

[0017] In other aspects, the present invention provides a method of producing a plant having tolerance to CESA-inhibiting herbicides, the method comprising regenerating a plant from a plant cell transformed with a polynucleotide operably linked to a promoter operable in plant cells, the promoter capable of expressing a mutated CESA polypeptide encoded by the polynucleotide, the expression of the mutated CESA polypeptide conferring to the plant tolerance to CESA-inhibiting herbicides.

[0018] In one aspect, the present invention provides a method of producing a progeny plant having tolerance to CESA-inhibiting herbicides, the method comprising: crossing a first CESA-inhibiting herbicides-tolerant plant with a second plant to produce a CESA-inhibiting herbicides-tolerant progeny plant, wherein the first plant and the progeny plant comprise in at least some of their cells a polynucleotide operably linked to a promoter operable in plant cells, the promoter capable of expressing a mutated CESA polypeptide encoded by the polynucleotide, the expression of the mutated CESA polypeptide conferring to the plant tolerance to CESA-inhibiting herbicides.

[0019] In addition, the present invention refers to a method for identifying a CESA-inhibiting herbicide by using a mutated CESA of the present invention encoded by a nucleic acid which comprises the nucleotide sequence of SEQ ID NO: 84, 85, 86, 87, 88, 89, 90, 91, 92, 93, 94, 95, 96, 97, or 98, or a variant, homologue, paralogue or orthologue thereof.

[0020] Said method comprises the steps of:
[0021] a) generating a transgenic cell or plant comprising a nucleic acid encoding a mutated CESA of the present invention, wherein the mutated CESA of the present invention is expressed;
[0022] b) applying a CESA-inhibiting herbicide to the transgenic cell or plant of a) and to a control cell or plant of the same variety;
[0023] c) determining the growth or the viability of the transgenic cell or plant and the control cell or plant after application of said test compound, and
[0024] d) selecting test compounds which confer reduced growth to the control cell or plant as compared to the growth of the transgenic cell or plant.

[0025] Another object refers to a method of identifying a nucleotide sequence encoding a mutated CESA which is resistant or tolerant to a CESA-inhibiting herbicide, the method comprising:
[0026] a) generating a library of mutated CESA-encoding nucleic acids,
[0027] b) screening a population of the resulting mutated CESA-encoding nucleic acids by expressing each of said nucleic acids in a cell or plant and treating said cell or plant with a CESA-inhibiting herbicide,
[0028] c) comparing the CESA-inhibiting herbicide-tolerance levels provided by said population of mutated CESA encoding nucleic acids with the CESA-inhibiting herbicide-tolerance level provided by a control CESA-encoding nucleic acid,
[0029] d) selecting at least one mutated CESA-encoding nucleic acid that provides a significantly increased level of tolerance to a CESA-inhibiting herbicide as compared to that provided by the control CESA-encoding nucleic acid.

[0030] In a preferred embodiment, the mutated CESA-encoding nucleic acid selected in step d) provides at least 2-fold as much tolerance to a CESA-inhibiting herbicide as compared to that provided by the control CESA-encoding nucleic acid.

[0031] The resistance or tolerance can be determined by generating a transgenic plant comprising a nucleic acid sequence of the library of step a) and comparing said transgenic plant with a control plant.

[0032] Another object refers to a method of identifying a plant or algae containing a nucleic acid encoding a mutated CESA which is resistant or tolerant to a CESA-inhibiting herbicide, the method comprising:
[0033] a) identifying an effective amount of a CESA-inhibiting herbicide in a culture of plant cells or green algae.
[0034] b) treating said plant cells or green algae with a mutagenizing agent,
[0035] c) contacting said mutagenized cells population with an effective amount of CESA-inhibiting herbicide, identified in a),
[0036] d) selecting at least one cell surviving these test conditions,
[0037] e) PCR-amplification and sequencing of CESA genes from cells selected in d) and comparing such sequences to wild-type CESA gene sequences, respectively.

[0038] In a preferred embodiment, the mutagenizing agent is ethylmethanesulfonate.

[0039] Another object refers to an isolated recombinantly produced, and/or chemically synthesized nucleic acid encoding a mutated CESA, the nucleic acid comprising the sequence of SEQ ID NO: 84, 85, 86, 87, 88, 89, 90, 91, 92, 93, 94, 95, 96, 97, or 98, or a variant thereof, as defined hereinafter.

[0040] In a preferred embodiment, the nucleic acid being identifiable by a method as defined above.

[0041] Another object refers to an isolated, recombinantly produced, and/or chemically synthesized mutated CESA polypeptide, the polypeptide comprising the sequence set forth in SEQ ID NO: 1, 2, 3, 4, 5, 6, 7, 8, 9, 10, 11, 12, 13, 14, 15, 16, 17, 18, 19, 20, 21, 22, 23, 24, 25, 26, 27, 28, 29, 30, 31, 32, 33, 34, 35, 36, 37, 38, 39, 40, 41, 42, 43, 44, 45, 46, 47, 48, 49, 50, 51, 52, 53, 54, 55, 56, 57, 58, 59, 60, 61, 62, 63, 64, 65, 66, 67, 68, 69, 70, 71, 72, 73, 74, 75, 76, 77, 78, 79, 80, 81, 82 or 83, a variant, derivative, orthologue, paralogue or homologue thereof, as defined hereinafter.

[0042] In still further aspects, the present invention provides a plant or plant part comprising in at least some of its cells a polynucleotide operably linked to a promoter operable in plant cells, the promoter capable of expressing a mutated CESA polypeptide encoded by the polynucleotide, the expression of the mutated CESA polypeptide conferring to the plant tolerance to CESA-inhibiting herbicides, wherein the plant or plant part further exhibits a second or third herbicide-tolerant trait.

[0043] In another embodiment, the invention refers to a plant cell transformed by and expressing a a mutated CESA nucleic acid according to the present invention or a plant which has been mutated to obtain a plant expressing, preferably over-expressing a a mutated CESA nucleic acid according to the present invention, wherein expression of said nucleic acid in the plant cell results in increased resistance or tolerance to a CESA-inhibiting herbicide as compared to a wild type variety of the plant cell

[0044] In another embodiment, the invention refers to a plant comprising a plant cell according to the present invention, wherein expression of the mutated CESA nucleic acid in the plant results in the plant's increased resistance to CESA-inhibiting herbicide as compared to a wild type variety of the plant.

[0045] The plants of the present invention can be transgenic or non-transgenic.

[0046] Preferably, the expression of the nucleic acid of the invention in the plant results in the plant's increased resistance to CESA-inhibiting herbicides as compared to a wild type variety of the plant. In another embodiment, the invention refers to a seed produced by a transgenic plant comprising a plant cell of the present invention, wherein the seed is true breeding for an increased resistance to a CESA-inhibiting herbicide as compared to a wild type variety of the seed.

[0047] In another embodiment, the invention refers to a method of producing a transgenic plant cell with an increased resistance to a CESA-inhibiting herbicide as compared to a wild type variety of the plant cell comprising, transforming the plant cell with an expression cassette comprising a a polynucleotide operably linked to a promoter operable in plant cells, the promoter capable of expressing a mutated CESA polypeptide encoded by the polynucleotide.

[0048] In another embodiment, the invention refers to a method of producing a transgenic plant comprising, (a) transforming a plant cell with an expression cassette comprising a a polynucleotide operably linked to a promoter operable in plant cells, the promoter capable of expressing a mutated CESA polypeptide encoded by the polynucleotide, and (b) generating a plant with an increased resistance to CESA-inhibiting herbicide from the plant cell.

[0049] Preferably, the expression cassette further comprises a transcription initiation regulatory region and a translation initiation regulatory region that are functional in the plant.

### BRIEF DESCRIPTION OF THE DRAWINGS

[0050] FIG. 1 A, B, C

[0051] FIG. 1 shows phylogenetic trees of cellulose synthase homologues in corn (A), soy (B), rice (C), Brassica napus (D) and Helianthus annuus (E).

[0052] FIG. 2 A, B, C, D, E, F

[0053] FIG. 2 shows amino acid alignments of six (A-F) identified regions in primary cellulose synthase proteins regions that cause tolerance to azine-herbicides once mutated.

[0054] FIG. 3 shows plants grown from M3 Arabidopsis seeds that were tested for improved tolerance to CESA-inhibiting herbicides in greenhouse studies with azine compounds FIG. 3A: indicated amounts [g ai/ha] of N2-(4-chloro-3,5,6-trifluoro-2-pyridyl)-6-(1-fluorocyclopentyl)-1,3,5-triazine-2,4-diamine; FIG. 3B: indicated amounts [g ai/ha] of 1-[4-chloro-3-(2,2,3,3,3-pentafluoropropoxymethyl)phenyl]-5-phenyl-1,2,4-triazole-3-carboxamide.

[0055] 1: wildtype

[0056] 2: SEQ ID NO: 1 Variant: R292H

### KEY TO SEQUENCE LISTING

TABLE 1

| SEQ | |
|---|---|
| ID NO | |
| Amino | |
| acid | Sequence/Origin |
| 1 | At_CESA1 |
| 2 | At_CESA2 |
| 3 | At_CESA3 |
| 4 | At_CESA4 |
| 5 | At_CESA5 |
| 6 | At_CESA6 |
| 7 | At_CESA7 |
| 8 | At_CESA8 |
| 9 | At_CESA9 |
| 10 | At_CESA10 |
| 11 | GRMZM2G027723\|GRMZM2G027723_T01 |
| 12 | GRMZM2G055795\|GRMZM2G055795_T01 |
| 13 | GRMZM2G039454\|GRMZM2G039454_T01 |
| 14 | GRMZM2G025231\|GRMZM2G025231_T02 |
| 15 | GRMZM2G142898\|GRMZM2G142898_T01 |
| 16 | GRMZM2G424832\|GRMZM2G424832_T01 |
| 17 | GRMZM2G177631\|GRMZM2G177631_T01 |
| 18 | GRMZM2G150404\|GRMZM2G150404_T01 |
| 19 | GRMZM2G028353\|GRMZM2G028353_T01 |
| 20 | GRMZM2G018241\|GRMZM2G018241_T01 |
| 21 | GRMZM2G037413\|GRMZM2G037413_T01 |
| 22 | GRMZM2G082580\|GRMZM2G082580_T01 |
| 23 | GRMZM2G112336\|GRMZM2G112336_T01 |
| 24 | GRMZM2G111642\|GRMZM2G111642_T01 |
| 25 | GRMZM2G113137\|GRMZM2G113137_T01 |
| 26 | Glyma02g36720\|Glyma02g36720.1 |
| 27 | Glyma02g08920\|Glyma02g08920.1 |
| 28 | Glyma12g36570\|Glyma12g36570.1 |
| 29 | Glyma12g17730\|Glyma12g17730.1 |
| 30 | Glyma06g06870\|Glyma06g06870.1 |
| 31 | Glyma06g30860\|Glyma06g30860.1 |
| 32 | Glyma06g47420\|Glyma06g47420.1 |
| 33 | Glyma06g30850\|Glyma06g30850.1 |
| 34 | Glyma06g07320\|Glyma06g07320.1 |
| 35 | Glyma04g07220\|Glyma04g07220.1 |
| 36 | Glyma04g06780\|Glyma04g06780.1 |
| 37 | Glyma04g23530\|Glyma04g23530.2 |
| 38 | Glyma08g15380\|Glyma08g15380.1 |
| 39 | Glyma08g12400\|Glyma08g12400.1 |
| 40 | Glyma17g08000\|Glyma17g08000.1 |
| 41 | Glyma13g27250\|Glyma13g27250.3 |
| 42 | Glyma05g29240\|Glyma05g29240.2 |
| 43 | Glyma05g32100\|Glyma05g32100.1 |
| 44 | Glyma15g43040\|Glyma15g43040.1 |
| 45 | Glyma09g15620\|Glyma09g15620.2 |
| 46 | Glyma10g36790\|Glyma10g36790.1 |
| 47 | Glyma16g28080\|Glyma16g28080.2 |
| 48 | Os01g54620.1 |
| 49 | Os03g59340.1 |
| 50 | Os03g62090.1 |
| 51 | Os05g08370.1 |
| 52 | Os06g02180.1 |
| 53 | Os06g22980.1 |
| 54 | Os06g39970.1 |
| 55 | Os07g10770.1 |
| 56 | Os07g14850.1 |
| 57 | Os07g24190.1 |
| 58 | Os07g24190.2 |
| 59 | Os07g24190.3 |
| 60 | Os08g25710.1 |
| 61 | Os09g25490.1 |
| 62 | Os10g32980.1 |
| 63 | Os10g42750.1 |
| 64 | Os12g36890.1 |
| 65 | BnaA06g23700D |
| 66 | BnaA03g55200D |
| 67 | BnaA09g06990D |
| 68 | BnaA02g34360D |
| 69 | BnaA03g52020D |
| 70 | BnaC02g02440D |
| 71 | BnaC03g49550D |
| 72 | BnaC02g43280D |
| 73 | BnaC07g43790D |
| 74 | BnaAnng01240D |
| 75 | BnaA01g04600D |
| 76 | BnaC01g06090D |
| 77 | BnaC03g02050D |
| 78 | BnaC09g06600D |
| 79 | Ha_Cesa1 |
| 80 | Ha_Cesa3 |
| 81 | Ha_Cesa7 |
| 82 | Ha_Cesa3b_fragment |
| 83 | Ha_Cesa6_fragment |

### DETAILED DESCRIPTION

[0058] The articles “a” and “an” are used herein to refer to one or more than one (i.e., to at least one) of the grammatical object of the article. By way of example, “an element” means one or more elements.

[0059] As used herein, the word “comprising,” or variations such as “comprises” or “comprising,” will be understood to imply the inclusion of a stated element, integer or step, or group of elements, integers or steps, but not the exclusion of any other element, integer or step, or group of elements, integers or steps.

[0060] The term “control of undesired vegetation or weeds” is to be understood as meaning the killing of weeds and/or otherwise retarding or inhibiting the normal growth of the weeds. Weeds, in the broadest sense, are understood as meaning all those plants which grow in locations where they are undesired. The weeds of the present invention include, for example, dicotyledonous and monocotyledonous weeds. Dicotyledonous weeds include, but are not limited to, weeds of the genera: Sinapis, Lepidium, Galium, Stellaria, Matricaria, Anthemis, Galinsoga, Chenopodium, Urtica, Senecio, Amaranthus, Portulaca, Xanthium, Convolvulus, Ipomoea, Polygonum, Sesbania, Ambrosia, Cirsium, Carduus, Sonchus, Solanum, Rorippa, Rotala, Lindernia, Lamium, Veronica, Abutilon, Emex, Datura, Viola, Galeopsis, Papaver, Centaurea, Trifolium, Ranunculus, and Taraxacum. Monocotyledonous weeds include, but are not limited to, weeds of of the genera: Echinochloa, Setaria, Panicum, Digitaria, Phleum, Poa, Festuca, Eleusine, Brachiaria, Lolium, Bromus, Avena, Cyperus, Sorghum, Agropyron, Cynodon, Monochoria, Fimbristyslis, Sagittaria, Eleocharis, Scirpus, Paspalum, Ischaemum, Sphenoclea, Dactyloctenium, Agrostis, Alopecurus, and Apera. In addition, the weeds of the present invention can include, for example, crop plants that are growing in an undesired location. For example, a volunteer maize plant that is in a field that predominantly comprises soybean plants can be considered a weed, if the maize plant is undesired in the field of soybean plants.

[0061] The term “plant” is used in its broadest sense as it pertains to organic material and is intended to encompass eukaryotic organisms that are members of the Kingdom Plantae, examples of which include but are not limited to vascular plants, vegetables, grains, flowers, trees, herbs, bushes, grasses, vines, ferns, mosses, fungi and algae, etc, as well as clones, offsets, and parts of plants used for asexual propagation (e.g. cuttings, pipings, shoots, rhizomes, underground stems, clumps, crowns, bulbs, corms, tubers, rhizomes, plants/tissues produced in tissue culture, etc.). The term “plant” further encompasses whole plants, ancestors and progeny of the plants and plant parts, including seeds, shoots, stems, leaves, roots (including tubers), flowers, florets, fruits, pedicles, peduncles, stamen, anther, stigma, style, ovary, petal, sepal, carpel, root tip, root cap, root hair, leaf hair, seed hair, pollen grain, microspore, cotyledon, hypocotyl, epicotyl, xylem, phloem, parenchyma, endosperm, a companion cell, a guard cell, and any other known organs, tissues, and cells of a plant, and tissues and organs, wherein each of the aforementioned comprise the gene/nucleic acid of interest. The term “plant” also encompasses plant cells, suspension cultures, callus tissue, embryos, meristematic regions, gametophytes, sporophytes, pollen and microspores, again wherein each of the aforementioned comprises the gene/nucleic acid of interest.

[0062] Plants that are particularly useful in the methods of the invention include all plants which belong to the superfamily Viridiplantae, in particular monocotyledonous and dicotyledonous plants including fodder or forage legumes, ornamental plants, food crops, trees or shrubs selected from the list comprising Acer spp., Actinidia spp., Abelmoschus spp., Agave sisalana, Agropyron spp., Agrostis stolonifera, Allium spp., Amaranthus spp., Ammophila arenaria, Ananas comosus, Annona spp., Apium graveolens, Arachis spp, Artocarpus spp., Asparagus officinalis, Avena spp. (e.g. Avena sativa, Avena fatua, Avena byzantina, Avena fatua var. sativa, Avena hybrida), Averrhoa carambola, Bambusa sp., Benincasa hispida, Bertholletia excelsea, Beta vulgaris, Brassica spp. (e.g. Brassica napus, Brassica rapa ssp. [canola, oilseed rape, turnip rape]), Cadaba farinosa, Camellia sinensis, Canna indica, Cannabis sativa, Capsicum spp., Carex elata, Carica papaya, Carissa macrocarpa, Carya spp., Carthamus tinctorius, Castanea spp., Ceiba pentandra, Cichorium endivia, Cinnamomum spp., Citrullus lanatus, Citrus spp., Cocos spp., Coffea spp., Colocasia esculenta, Cola spp., Corchorus sp., Coriandrum sativum, Corylus spp., Crataegus spp., Crocus sativus, Cucurbita spp., Cucumis spp., Cynara spp., Daucus carota, Desmodium spp., Dimocarpus longan, Dioscorea spp., Diospyros spp., Echinochloa spp., Elaeis (e.g. Elaeis guineensis, Elaeis oleifera), Eleusine coracana, Eragrostis tef, Erianthus sp., Eriobotrya japonica, Eucalyptus sp., Eugenia uniflora, Fagopyrum spp., Fagus spp., Festuca arundinacea, Ficus carica, Fortunella spp., Fragaria spp., Ginkgo biloba, Glycine spp. (e.g. Glycine max, Soja hispida or Soja max), Gossypium hirsutum, Helianthus spp. (e.g. Helianthus annuus), Hemerocallis fulva, Hibiscus spp., Hordeum spp. (e.g. Hordeum vulgare), Ipomoea batatas, Juglans spp., Lactuca sativa, Lathyrus spp., Lens culinaris, Linum usitatissimum, Litchi chinensis, Lotus spp., Luffa acutangula, Lupinus spp., Luzula sylvatica, Lycopersicon spp. (e.g. Lycopersicon esculentum, Lycopersicon lycopersicum, Lycopersicon pyriforme), Macrotyloma spp., Malus spp., Malpighia emarginata, Mammea americana, Mangifera indica, Manihot spp., Manilkara zapota, Medicago sativa, Melilotus spp., Mentha spp., Miscanthus sinensis, Momordica spp., Morus nigra, Musa spp., Nicotiana spp., Olea spp., Opuntia spp., Ornithopus spp., Oryza spp. (e.g. Oryza sativa, Oryza latifolia), Panicum miliaceum, Panicum virgatum, Passiflora edulis, Pastinaca sativa, Pennisetum sp., Persea spp., Petroselinum crispum, Phalaris arundinacea, Phaseolus spp., Phleum pratense, Phoenix spp., Phragmites australis, Physalis spp., Pinus spp., Pistacia vera, Pisum spp., Poa spp., Populus spp., Prosopis spp., Prunus spp., Psidium spp., Punica granatum, Pyrus communis, Quercus spp., Raphanus sativus, Rheum rhabarbarum, Ribes spp., Ricinus communis, Rubus spp., Saccharum spp., Salix sp., Sambucus spp., Secale cereale, Sesamum spp., Sinapis sp., Solanum spp. (e.g. Solanum tuberosum, Solanum integrifolium or Solanum lycopersicum), Sorghum bicolor, Spinacia spp., Syzygium spp., Tagetes spp., Tamarindus indica, Theobroma cacao, Trifolium spp., Tripsacum dactyloides, Triticosecale rimpaui, Triticum spp. (e.g. Triticum aestivum, Triticum durum, Triticum turgidum, Triticum hybernum, Triticum macha, Triticum sativum, Triticum monococcum or Triticum vulgare), Tropaeolum minus, Tropaeolum majus, Vaccinium spp., Vicia spp., Vigna spp., Viola odorata, Vitis spp., Zea mays, Zizania palustris, Ziziphus spp., amaranth, artichoke, asparagus, broccoli, Brussels sprouts, cabbage, canola, carrot, cauliflower, celery, collard greens, flax, kale, lentil, oilseed rape, okra, onion, potato, rice, soybean, strawberry, sugar beet, sugar cane, sunflower, tomato, squash, tea and algae, amongst others. According to a preferred embodiment of the present invention, the plant is a crop plant. Examples of crop plants include inter alia soybean, sunflower, canola, alfalfa, rapeseed, cotton, tomato, potato or tobacco. Further preferebly, the plant is a monocotyledonous plant, such as sugarcane. Further preferably, the plant is a cereal, such as rice, maize, wheat, barley, millet, rye, sorghum or oats.

[0063] Generally, the term “herbicide” is used herein to mean an active ingredient that kills, controls or otherwise adversely modifies the growth of plants. The preferred amount or concentration of the herbicide is an “effective amount” or “effective concentration.” By “effective amount” and “effective concentration” is intended an amount and concentration, respectively, that is sufficient to kill or inhibit the growth of a similar, wild-type, plant, plant tissue, plant cell, or host cell, but that said amount does not kill or inhibit as severely the growth of the herbicide-resistant plants, plant tissues, plant cells, and host cells of the present invention. Typically, the effective amount of a herbicide is an amount that is routinely used in agricultural production systems to kill weeds of interest. Such an amount is known to those of ordinary skill in the art. Herbicidal activity is exhibited by herbicides useful for the the present invention when they are applied directly to the plant or to the locus of the plant at any stage of growth or before planting or emergence. The effect observed depends upon the plant species to be controlled, the stage of growth of the plant, the application parameters of dilution and spray drop size, the particle size of solid components, the environmental conditions at the time of use, the specific compound employed, the specific adjuvants and carriers employed, the soil type, and the like, as well as the amount of chemical applied. These and other factors can be adjusted as is known in the art to promote non-selective or selective herbicidal action. Generally, it is preferred to apply the herbicide postemergence to relatively immature undesirable vegetation to achieve the maximum control of weeds.

[0064] By a “herbicide-tolerant” or “herbicide-resistant” plant, it is intended that a plant that is tolerant or resistant to at least one herbicide at a level that would normally kill, or inhibit the growth of, a normal or wild-type plant. Levels of herbicide that normally inhibit growth of a non-tolerant plant are known and readily determined by those skilled in the art. Examples include the amounts recommended by manufacturers for application. The maximum rate is an example of an amount of herbicide that would normally inhibit growth of a non-tolerant plant. For the present invention, the terms “herbicide-tolerant” and “herbicide-resistant” are used interchangeably and are intended to have an equivalent meaning and an equivalent scope. Similarly, the terms “herbicide-tolerance” and “herbicide-resistance” are used interchangeably and are intended to have an equivalent meaning and an equivalent scope. Similarly, the terms “tolerant” and “resistant” are used interchangeably and are intended to have an equivalent meaning and an equivalent scope. As used herein, in regard to an herbicidal composition useful in various embodiments hereof, terms such as CESA-inhibiting herbicides, and the like, refer to those agronomically acceptable herbicide active ingredients (A.I.) recognized in the art. Similarly, terms such as fungicide, nematicide, pesticide, and the like, refer to other agronomically acceptable active ingredients recognized in the art.

[0065] When used in reference to a particular mutant enzyme or polypeptide, terms such as herbicide-tolerant and herbicide-tolerance refer to the ability of such enzyme or polypeptide to perform its physiological activity in the presence of an amount of an herbicide A.I. that would normally inactivate or inhibit the activity of the wild-type (non-mutant) version of said enzyme or polypeptide. For example, when used specifically in regard to a CESA enzyme, it refers specifically to the ability to tolerate a CESA-inhibitor. By “herbicide-tolerant mutated CESA protein” or “herbicide-resistant mutated CESA protein”, it is intended that such a CESA protein displays higher CESA activity, relative to the CESA activity of a wild-type CESA protein, when in the presence of at least one herbicide that is known to interfere with CESA activity and at a concentration or level of the herbicide that is known to inhibit the CESA activity of the wild-type CESA protein. Furthermore, the CESA activity of such a herbicide-tolerant or herbicide-resistant mutated CESA protein may be referred to herein as “herbicide-tolerant” or “herbicide-resistant” CESA activity.

[0066] As used herein, “recombinant,” when referring to nucleic acid or polypeptide, indicates that such material has been altered as a result of human application of a recombinant technique, such as by polynucleotide restriction and ligation, by polynucleotide overlap-extension, or by genomic insertion or transformation. A gene sequence open reading frame is recombinant if that nucleotide sequence has been removed from it natural text and cloned into any type of artificial nucleic acid vector. The term recombinant also can refer to an organism having a recombinant material, e.g., a plant that comprises a recombinant nucleic acid can be considered a recombinant plant.

[0067] The term “transgenic plant” refers to a plant that comprises a heterologous polynucleotide. Preferably, the heterologous polynucleotide is stably integrated within the genome such that the polynucleotide is passed on to successive generations. The heterologous polynucleotide may be integrated into the genome alone or as part of a recombinant expression cassette. “Transgenic” is used herein to refer to any cell, cell line, callus, tissue, plant part or plant, the genotype of which has been so altered by the presence of heterologous nucleic acid including those transgenic organisms or cells initially so altered, as well as those created by crosses or asexual propagation from the initial transgenic organism or cell. In some embodiments, a “recombinant” organism is a “transgenic” organism. The term “transgenic” as used herein is not intended to encompass the alteration of the genome (chromosomal or extra-chromosomal) by conventional plant breeding methods (e.g., crosses) or by naturally occurring events such as, e.g., self-fertilization, random cross-fertilization, non-recombinant viral infection, non-recombinant bacterial transformation, non-recombinant transposition, or spontaneous mutation.

[0068] As used herein, “mutagenized” refers to an organism or DNA thereof having alteration(s) in the biomolecular sequence of its native genetic material as compared to the sequence of the genetic material of a corresponding wild-type organism or DNA, wherein the alteration(s) in genetic material were induced and/or selected by human action. Examples of human action that can be used to produce a mutagenized organism or DNA include, but are not limited to, as illustrated in regard to herbicide tolerance: tissue culture of plant cells (e.g., calli) and selection thereof with herbicides (e.g., CESA-inhibiting herbicides), treatment of plant cells with a chemical mutagen such as EMS and subsequent selection with herbicide(s); or by treatment of plant cells with x-rays and subsequent selection with herbicide(s). Any method known in the art can be used to induce mutations. Methods of inducing mutations can induce mutations in random positions in the genetic material or can induce mutations in specific locations in the genetic material (i.e., can be directed mutagenesis techniques), such as by use of a genoplasty technique.

[0069] As used herein, a “genetically modified organism” (GMO) is an organism whose genetic characteristics contain alteration(s) that were produced by human effort causing transfection that results in transformation of a target organism with genetic material from another or “source” organism, or with synthetic or modified-native genetic material, or an organism that is a descendant thereof that retains the inserted genetic material. The source organism can be of a different type of organism (e.g., a GMO plant can contain bacterial genetic material) or from the same type of organism (e.g., a GMO plant can contain genetic material from another plant). As used herein in regard to plants and other organisms, “recombinant,” “transgenic,” and “GMO” are considered synonyms and indicate the presence of genetic material from a different source; in contrast, “mutagenized” is used to refer to a plant or other organism, or the DNA thereof, in which no such transgenic material is present, but in which the native genetic material has become mutated so as to differ from a corresponding wild-type organism or DNA.

[0070] As used herein, “wild-type” or “corresponding wild-type plant” means the typical form of an organism or its genetic material, as it normally occurs, as distinguished from, e.g., mutagenized and/or recombinant forms. Similarly, by “control cell” or “similar, wild-type, plant, plant tissue, plant cell or host cell” is intended a plant, plant tissue, plant cell, or host cell, respectively, that lacks the herbicide-resistance characteristics and/or particular polynucleotide of the invention that are disclosed herein. The use of the term “wild-type” is not, therefore, intended to imply that a plant, plant tissue, plant cell, or other host cell lacks recombinant DNA in its genome, and/or does not possess herbicide-resistant characteristics that are different from those disclosed herein.

[0071] As used herein, “descendant” refers to any generation plant. In some embodiments, a descendant is a first, second, third, fourth, fifth, sixth, seventh, eight, ninth, or tenth generation plant.

[0072] As used herein, “progeny” refers to a first generation plant.

[0073] The term “seed” comprises seeds of all types, such as, for example, true seeds, caryopses, achenes, fruits, tubers, seedlings and similar forms. In the context of Brassica and Sinapis species, “seed” refers to true seed(s) unless otherwise specified. For example, the seed can be seed of transgenic plants or plants obtained by traditional breeding methods. Examples of traditional breeding methods can include cross-breeding, selfing, backcrossing, embryo rescue, in-crossing, out-crossing, inbreeding, selection, asexual propagation, and other traditional techniques as are known in the art.

[0074] Although exemplified with reference to specific plants or plant varieties and their hybrids, in various embodiments, the presently described methods using CESA-inhibiting herbicides can be employed with a variety of commercially valuable plants. CESA-inhibiting herbicides-tolerant plant lines described as useful herein can be employed in weed control methods either directly or indirectly, i. e. either as crops for herbicide treatment or as CESA-inhibiting herbicides-tolerance trait donor lines for development, as by traditional plant breeding, to produce other varietal and/or hybrid crops containing such trait or traits. All such resulting variety or hybrids crops, containing the ancestral CESA-inhibiting herbicides-tolerance trait or traits can be referred to herein as progeny or descendant of the ancestral, CESA-inhibiting herbicides-tolerant line(s). Such resulting plants can be said to retain the “herbicide tolerance characteristic(s)” of the ancestral plant, i.e. meaning that they possess and express the ancestral genetic molecular components responsible for the trait.

[0075] In one aspect, the present invention provides a plant or plant part comprising a polynucleotide encoding a mutated CESA polypeptide, the expression of said polynucleotide confers to the plant or plant part tolerance to CESA-inhibiting herbicides.

[0076] In a preferred embodiment, the plant has been previously produced by a process comprising recombinantly preparing a plant by introducing and over-expressing a mutated CESA transgene according to the present invention, as described in greater detail hereinafter.

[0077] In another preferred embodiment, the plant has been previously produced by a process comprising in situ mutagenizing plant cells or seeds, to obtain plant cells or plants which express a mutated CESA.

[0078] In another embodiment, the polynucleotide encoding the mutated CESA polypeptide polypeptide comprises the nucleic acid sequence set forth in SEQ ID NO: 84, 85, 86, 87, 88, 89, 90, 91, 92, 93, 94, 95, 96, 97, or 98, or a variant or derivative thereof.

[0079] In other embodiments, the mutated CESA polypeptide for use according to the present invention is a functional variant having, over the full-length of the variant, at least about 80%, illustratively, at least about 80%, 90%, 95%, 98%, 99% or more amino acid sequence identity to SEQ ID NO: 1, 2, 3, 4, 5, 6, 7, 8, 9, 10, 11, 12, 13, 14, 15, 16, 17, 18, 19, 20, 21, 22, 23, 24, 25, 26, 27, 28, 29, 30, 31, 32, 33, 34, 35, 36, 37, 38, 39, 40, 41, 42, 43, 44, 45, 46, 47, 48, 49, 50, 51, 52, 53, 54, 55, 56, 57, 58, 59, 60, 61, 62, 63, 64, 65, 66, 67, 68, 69, 70, 71, 72, 73, 74, 75, 76, 77, 78, 79, 80, 81, 82 or 83.

[0080] In another embodiment, the mutated CESA polypeptide for use according to the present invention is a functional fragment of a polypeptide having the amino acid sequence set forth in SEQ ID NO: 1, 2, 3, 4, 5, 6, 7, 8, 9, 10, 11, 12, 13, 14, 15, 16, 17, 18, 19, 20, 21, 22, 23, 24, 25, 26, 27, 28, 29, 30, 31, 32, 33, 34, 35, 36, 37, 38, 39, 40, 41, 42, 43, 44, 45, 46, 47, 48, 49, 50, 51, 52, 53, 54, 55, 56, 57, 58, 59, 60, 61, 62, 63, 64, 65, 66, 67, 68, 69, 70, 71, 72, 73, 74, 75, 76, 77, 78, 79, 80, 81, 82 or 83.

[0081] It is recognized that the CESA polynucleotide molecules and CESA polypeptides of the invention encompass polynucleotide molecules and polypeptides comprising a nucleotide or an amino acid sequence that is sufficiently identical to nucleotide sequences set forth in SEQ ID Nos: 84, 85, 86, 87, 88, 89, 90, 91, 92, 93, 94, 95, 96, 97, or 98, or to the amino acid sequences set forth in SEQ ID Nos: 1, 2, 3, 4, 5, 6, 7, 8, 9, 10, 11, 12, 13, 14, 15, 16, 17, 18, 19, 20, 21, 22, 23, 24, 25, 26, 27, 28, 29, 30, 31, 32, 33, 34, 35, 36, 37, 38, 39, 40, 41, 42, 43, 44, 45, 46, 47, 48, 49, 50, 51, 52, 53, 54, 55, 56, 57, 58, 59, 60, 61, 62, 63, 64, 65, 66, 67, 68, 69, 70, 71, 72, 73, 74, 75, 76, 77, 78, 79, 80, 81, 82 or 83. The term “sufficiently identical” is used herein to refer to a first amino acid or nucleotide sequence that contains a sufficient or minimum number of identical or equivalent (e.g., with a similar side chain) amino acid residues or nucleotides to a second amino acid or nucleotide sequence such that the first and second amino acid or nucleotide sequences have a common structural domain and/or common functional activity.

[0082] Generally, “sequence identity” refers to the extent to which two optimally aligned DNA or amino acid sequences are invariant throughout a window of alignment of components, e.g., nucleotides or amino acids. An “identity fraction” for aligned segments of a test sequence and a reference sequence is the number of identical components that are shared by the two aligned sequences divided by the total number of components in reference sequence segment, i.e., the entire reference sequence or a smaller defined part of the reference sequence. “Percent identity” is the identity fraction times 100. Optimal alignment of sequences for aligning a comparison window are well known to those skilled in the art and may be conducted by tools such as the local homology algorithm of Smith and Waterman, the homology alignment algorithm of Needleman and Wunsch, the search for similarity method of Pearson and Lipman, and preferably by computerized implementations of these algorithms such as GAP, BESTFIT, FASTA, and TFASTA available as part of the GCG. Wisconsin Package. (Accelrys Inc. Burlington, Mass.)

[0083] Polynucleotides and Oligonucleotides

[0084] By an “isolated polynucleotide”, including DNA, RNA, or a combination of these, single or double stranded, in the sense or antisense orientation or a combination of both, dsRNA or otherwise, we mean a polynucleotide which is at least partially separated from the polynucleotide sequences with which it is associated or linked in its native state. Preferably, the isolated polynucleotide is at least 60% free, preferably at least 75% free, and most preferably at least 90% free from other components with which they are naturally associated. As the skilled addressee would be aware, an isolated polynucleotide can be an exogenous polynucleotide present in, for example, a transgenic organism which does not naturally comprise the polynucleotide. Furthermore, the terms “polynucleotide(s)”, “nucleic acid sequence(s)”, “nucleotide sequence(s)”, “nucleic acid(s)”, “nucleic acid molecule” are used interchangeably herein and refer to nucleotides, either ribonucleotides or deoxyribonucleotides or a combination of both, in a polymeric unbranched form of any length.

[0085] The term “mutated CESA nucleic acid” refers to a CESA nucleic acid having a sequence that is mutated from a wild-type CESA nucleic acid and that confers increased CESA-inhibiting herbicide tolerance to a plant in which it is expressed. Furthermore, the term “mutated cellulose synthase (mutated CESA)” refers to the replacement of an amino acid of the wild-type primary sequences of SEQ ID NO: 1, 2, 3, 4, 5, 6, 7, 8, 9, 10, 11, 12, 13, 14, 15, 16, 17, 18, 19, 20, 21, 22, 23, 24, 25, 26, 27, 28, 29, 30, 31, 32, 33, 34, 35, 36, 37, 38, 39, 40, 41, 42, 43, 44, 45, 46, 47, 48, 49, 50, 51, 52, 53, 54, 55, 56, 57, 58, 59, 60, 61, 62, 63, 64, 65, 66, 67, 68, 69, 70, 71, 72, 73, 74, 75, 76, 77, 78, 79, 80, 81, 82 or 83, or a variant, a derivative, a homologue, an orthologue, or paralogue thereof, with another amino acid. The expression “mutated amino acid” will be used below to designate the amino acid which is replaced by another amino acid, thereby designating the site of the mutation in the primary sequence of the protein.

[0086] In a preferred embodiment, the CESA nucleotide sequence encoding a mutated CESA comprises the sequence of SEQ ID NO: 84, 85, 86, 87, 88, 89, 90, 91, 92, 93, 94, 95, 96, 97, or 98, or a variant or derivative thereof

[0087] Furthermore, it will be understood by the person skilled in the art that the CESA nucleotide sequences encompasse homologues, paralogues and and orthologues of SEQ ID NO: 84, 85, 86, 87, 88, 89, 90, 91, 92, 93, 94, 95, 96, 97, or 98, as defined hereinafter.

[0088] The term “variant” with respect to a sequence (e.g., a polypeptide or nucleic acid sequence such as—for example—a transcription regulating nucleotide sequence of the invention) is intended to mean substantially similar sequences. For nucleotide sequences comprising an open reading frame, variants include those sequences that, because of the degeneracy of the genetic code, encode the identical amino acid sequence of the native protein. Naturally occurring allelic variants such as these can be identified with the use of well-known molecular biology techniques, as, for example, with polymerase chain reaction (PCR) and hybridization techniques. Variant nucleotide sequences also include synthetically derived nucleotide sequences, such as those generated, for example, by using site-directed mutagenesis and for open reading frames, encode the native protein comprising the sequence of SEQ ID NO: 1, 2, 3, 4, 5, 6, 7, 8, 9, 10, 11, 12, 13, 14, 15, 16, 17, 18, 19, 20, 21, 22, 23, 24, 25, 26, 27, 28, 29, 30, 31, 32, 33, 34, 35, 36, 37, 38, 39, 40, 41, 42, 43, 44, 45, 46, 47, 48, 49, 50, 51, 52, 53, 54, 55, 56, 57, 58, 59, 60, 61, 62, 63, 64, 65, 66, 67, 68, 69, 70, 71, 72, 73, 74, 75, 76, 77, 78, 79, 80, 81, 82 or 83, as well as those that encode a polypeptide having amino acid substitutions relative to the native protein, e.g. the mutated CESA according to the present invention as disclosed herein. Generally, nucleotide sequence variants of the invention will have at least 30, 40, 50, 60, to 70%, e.g., preferably 71%, 72%, 73%, 74%, 75%, 76%, 77%, 78%, to 79%, generally at least 80%, e.g., 81%-84%, at least 85%, e.g., 86%, 87%, 88%, 89%, 90%, 91%, 92%, 93%, 94%, 95%, 96%, 97%, to 98% and 99% nucleotide “sequence identity” to the nucleotide sequence of SEQ ID NO: 84, 85, 86, 87, 88, 89, 90, 91, 92, 93, 94, 95, 96, 97, or 98. The % identity of a polynucleotide is determined by GAP (Needleman and Wunsch, 1970) analysis (GCG program) with a gap creation penalty=5, and a gap extension penalty=0.3. Unless stated otherwise, the query sequence is at least 45 nucleotides in length, and the GAP analysis aligns the two sequences over a region of at least 45 nucleotides. Preferably, the query sequence is at least 150 nucleotides in length, and the GAP analysis aligns the two sequences over a region of at least 150 nucleotides. More preferably, the query sequence is at least 300 nucleotides in length and the GAP analysis aligns the two sequences over a region of at least 300 nucleotides. Even more preferably, the GAP analysis aligns the two sequences over their entire length.

[0089] Polypeptides

[0090] By “substantially purified polypeptide” or “purified” a polypeptide is meant that has been separated from one or more lipids, nucleic acids, other polypeptides, or other contaminating molecules with which it is associated in its native state. It is preferred that the substantially purified polypeptide is at least 60% free, more preferably at least 75% free, and more preferably at least 90% free from other components with which it is naturally associated. As the skilled addressee will appreciate, the purified polypeptide can be a recombinantly produced polypeptide. The terms “polypeptide” and “protein” are generally used interchangeably and refer to a single polypeptide chain which may or may not be modified by addition of non-amino acid groups. It would be understood that such polypeptide chains may associate with other polypeptides or proteins or other molecules such as co-factors. The terms “proteins” and “polypeptides” as used herein also include variants, mutants, modifications, analogous and/or derivatives of the polypeptides of the invention as described herein.

[0091] The % identity of a polypeptide is determined by GAP (Needleman and Wunsch, 1970) analysis (GCG program) with a gap creation penalty=5, and a gap extension penalty=0.3. The query sequence is at least 25 amino acids in length, and the GAP analysis aligns the two sequences over a region of at least 25 amino acids. More preferably, the query sequence is at least 50 amino acids in length, and the GAP analysis aligns the two sequences over a region of at least 50 amino acids. More preferably, the query sequence is at least 100 amino acids in length and the GAP analysis aligns the two sequences over a region of at least 100 amino acids. Even more preferably, the query sequence is at least 250 amino acids in length and the GAP analysis aligns the two sequences over a region of at least 250 amino acids. Even more preferably, the GAP analysis aligns the two sequences over their entire length.

[0092] With regard to a defined polypeptide, it will be appreciated that % identity figures higher than those provided above will encompass preferred embodiments. Thus, where applicable, in light of the minimum % identity figures, it is preferred that the CESA polypeptide of the invention comprises an amino acid sequence which is at least 40%, more preferably at least 45%, more preferably at least 50%, more preferably at least 55%, more preferably at least 60%, more preferably at least 65%, more preferably at least 70%, more preferably at least 75%, more preferably at least 80%, more preferably at least 85%, more preferably at least 90%, more preferably at least 91%, more preferably at least 92%, more preferably at least 93%, more preferably at least 94%, more preferably at least 95%, more preferably at least 96%, more preferably at least 97%, more preferably at least 98%, more preferably at least 99%, more preferably at least 99.1%, more preferably at least 99.2%, more preferably at least 99.3%, more preferably at least 99.4%, more preferably at least 99.5%, more preferably at least 99.6%, more preferably at least 99.7%, more preferably at least 99.8%, and even more preferably at least 99.9% identical to SEQ ID NO: 1, 2, 3, 4, 5, 6, 7, 8, 9, 10, 11, 12, 13, 14, 15, 16, 17, 18, 19, 20, 21, 22, 23, 24, 25, 26, 27, 28, 29, 30, 31, 32, 33, 34, 35, 36, 37, 38, 39, 40, 41, 42, 43, 44, 45, 46, 47, 48, 49, 50, 51, 52, 53, 54, 55, 56, 57, 58, 59, 60, 61, 62, 63, 64, 65, 66, 67, 68, 69, 70, 71, 72, 73, 74, 75, 76, 77, 78, 79, 80, 81, 82 or 83.

[0093] By “variant” polypeptide is intended a polypeptide derived from the protein of SEQ ID NO: 1, 2, 3, 4, 5, 6, 7, 8, 9, 10, 11, 12, 13, 14, 15, 16, 17, 18, 19, 20, 21, 22, 23, 24, 25, 26, 27, 28, 29, 30, 31, 32, 33, 34, 35, 36, 37, 38, 39, 40, 41, 42, 43, 44, 45, 46, 47, 48, 49, 50, 51, 52, 53, 54, 55, 56, 57, 58, 59, 60, 61, 62, 63, 64, 65, 66, 67, 68, 69, 70, 71, 72, 73, 74, 75, 76, 77, 78, 79, 80, 81, 82 or 83, by deletion (so-called truncation) or addition of one or more amino acids to the N-terminal and/or C-terminal end of the native protein; deletion or addition of one or more amino acids at one or more sites in the native protein; or substitution of one or more amino acids at one or more sites in the native protein. Such variants may result from, for example, genetic polymorphism or from human manipulation. Methods for such manipulations are generally known in the art.

[0094] “Derivatives” of a protein encompass peptides, oligopeptides, polypeptides, proteins and enzymes having amino acid substitutions, deletions and/or insertions relative to the unmodified protein in question and having similar biological and functional activity as the unmodified protein from which they are derived. Thus, functional variants and fragments of the CESA polypeptides, and nucleic acid molecules encoding them, also are within the scope of the present invention, and unless specifically described otherwise, irrespective of the origin of said polypeptide and irrespective of whether it occurs naturally. Various assays for functionality of a CESA polypeptide can be employed. For example, a functional variant or fragment of the CESA polypeptide can be assayed to determine its ability to confer CESA-inhibiting herbicides tolerance. By way of illustration, a CESA-inhibiting herbicides tolerance can be defined as insensitivity to CESA inhibiting herbicides sufficient to provide a determinable increase in tolerance to CESA-inhibiting herbicides in a plant or plant part comprising a recombinant polynucleotide encoding the variant or fragment of the CESA polypeptide, wherein the plant or plant part expresses the variant or fragment at up to about 0.5%, illustratively, about 0.05 to about 0.5%, about 0.1 to about 0.4%, and about 0.2 to about 0.3%, of the total cellular protein relative to a similarly treated control plant that does not express the variant or fragment.

[0095] In a preferred embodiment, the mutated CESA polypeptide is a functional variant or fragment of a cellulose synthase having the amino acid sequence set forth in SEQ ID NO: 1, 3, 11, 16, 20, 23, 28, 35, 45, 51, 55, 66, 69, 74, 75, 79, or 80 wherein the functional variant or fragment has at least about 80% amino acid sequence identity to SEQ ID NO: 1, 3, 11, 16, 20, 23, 28, 35, 45, 51, 55, 66, 69, 74, 75, 79, or 80.

[0096] In other embodiments, the functional variant or fragment further has a CESA-inhibiting herbicides tolerance defined as insensitivity to CESA inhibiting herbicides sufficient to provide a determinable increase in tolerance to CESA-inhibiting herbicides in a plant or plant part comprising a recombinant polynucleotide encoding the variant or fragment, wherein the plant or plant part expresses the variant or fragment at up to about 0.5% of the total cellular protein to a similarly treated control plant that does not express the variant or fragment.

[0097] “Homologues” of a protein encompass peptides, oligopeptides, polypeptides, proteins and enzymes having amino acid substitutions, deletions and/or insertions relative to the unmodified protein in question and having similar biological and functional activity as the unmodified protein from which they are derived.

[0098] In addition, one of ordinary skill in the art will further appreciate that changes can be introduced by mutation into the nucleotide sequences of the invention thereby leading to changes in the amino acid sequence of the encoded proteins without altering the biological activity of the proteins. Thus, for example, an isolated polynucleotide molecule encoding a mutated CESA polypeptide having an amino acid sequence that differs from that of SEQ ID NO: 1, 2, 3, 4, 5, 6, 7, 8, 9, 10, 11, 12, 13, 14, 15, 16, 17, 18, 19, 20, 21, 22, 23, 24, 25, 26, 27, 28, 29, 30, 31, 32, 33, 34, 35, 36, 37, 38, 39, 40, 41, 42, 43, 44, 45, 46, 47, 48, 49, 50, 51, 52, 53, 54, 55, 56, 57, 58, 59, 60, 61, 62, 63, 64, 65, 66, 67, 68, 69, 70, 71, 72, 73, 74, 75, 76, 77, 78, 79, 80, 81, 82 or 83, can be created by introducing one or more nucleotide substitutions, additions, or deletions into the corresponding nucleotide sequence, such that one or more amino acid substitutions, additions or deletions are introduced into the encoded protein. Mutations can be introduced by standard techniques, such as site-directed mutagenesis and PCR-mediated mutagenesis. Such variant nucleotide sequences are also encompassed by the present invention. For example, preferably, conservative amino acid substitutions may be made at one or more predicted preferably nonessential amino acid residues. A “nonessential” amino acid residue is a residue that can be altered from the wild-type sequence of a protein without altering the biological activity, whereas an “essential” amino acid residue is required for biological activity.

[0099] A deletion refers to removal of one or more amino acids from a protein.

[0100] An insertion refers to one or more amino acid residues being introduced into a predetermined site in a protein. Insertions may comprise N-terminal and/or C-terminal fusions as well as intra-sequence insertions of single or multiple amino acids. Generally, insertions within the amino acid sequence will be smaller than N- or C-terminal fusions, of the order of about 1 to 10 residues. Examples of N- or C-terminal fusion proteins or peptides include the binding domain or activation domain of a transcriptional activator as used in the yeast two-hybrid system, phage coat proteins, (histidine)-6-tag, glutathione 5-transferase-tag, protein A, maltose-binding protein, dihydrofolate reductase, Tag⋅100 epitope, c-myc epitope, FLAG®-epitope, lacZ, CMP (calmodulin-binding peptide), HA epitope, protein C epitope and VSV epitope.

[0101] A substitution refers to replacement of amino acids of the protein with other amino acids having similar properties (such as similar hydrophobicity, hydrophilicity, antigenicity, propensity to form or break α-helical structures or β-sheet structures). Amino acid substitutions are typically of single residues, but may be clustered depending upon functional constraints placed upon the polypeptide and may range from 1 to 10 amino acids; insertions will usually be of the order of about 1 to 10 amino acid residues. A conservative amino acid substitution is one in which the amino acid residue is replaced with an amino acid residue having a similar side chain. Families of amino acid residues having similar side chains have been defined in the art. These families include amino acids with basic side chains (e.g., lysine, arginine, histidine), acidic side chains (e.g., aspartic acid, glutamic acid), uncharged polar side chains (e.g., glycine, asparagine, glutamine, serine, threonine, tyrosine, cysteine), nonpolar side chains (e.g., alanine, valine, leucine, isoleucine, proline, phenylalanine, methionine, tryptophan), beta-branched side chains (e.g., threonine, valine, isoleucine) and aromatic side chains (e.g., tyrosine, phenylalanine, tryptophan, histidine). Such substitutions would not be made for conserved amino acid residues, or for amino acid residues residing within a conserved motif. Conservative substitution tables are well known in the art (see for example Creighton (1984) Proteins. W.H. Freeman and Company (Eds).

[0102] Amino acid substitutions, deletions and/or insertions may readily be made using peptide synthetic techniques well known in the art, such as solid phase peptide synthesis and the like, or by recombinant DNA manipulation. Methods for the manipulation of DNA sequences to produce substitution, insertion or deletion variants of a protein are well known in the art. For example, techniques for making substitution mutations at predetermined sites in DNA are well known to those skilled in the art and include M13 mutagenesis, T7-Gen in vitro mutagenesis (USB, Cleveland, Ohio), QuickChange Site Directed mutagenesis (Stratagene, San Diego, Calif.), PCR-mediated site-directed mutagenesis or other site-directed mutagenesis protocols.

[0103] “Derivatives” further include peptides, oligopeptides, polypeptides which may, compared to the amino acid sequence of the naturally-occurring form of the protein, such as the protein of interest, comprise substitutions of amino acids with non-naturally occurring amino acid residues, or additions of non-naturally occurring amino acid residues. “Derivatives” of a protein also encompass peptides, oligopeptides, polypeptides which comprise naturally occurring altered (glycosylated, acylated, prenylated, phosphorylated, myristoylated, sulphated etc.) or non-naturally altered amino acid residues compared to the amino acid sequence of a naturally-occurring form of the polypeptide. A derivative may also comprise one or more non-amino acid substituents or additions compared to the amino acid sequence from which it is derived, for example a reporter molecule or other ligand, covalently or non-covalently bound to the amino acid sequence, such as a reporter molecule which is bound to facilitate its detection, and non-naturally occurring amino acid residues relative to the amino acid sequence of a naturally-occurring protein. Furthermore, “derivatives” also include fusions of the naturally-occurring form of the protein with tagging peptides such as FLAG, HIS6 or thioredoxin (for a review of tagging peptides, see Terpe, Appl. Microbiol. Biotechnol. 60, 523-533, 2003).

[0104] “Orthologues” and “paralogues” encompass evolutionary concepts used to describe the ancestral relationships of genes. Paralogues are genes within the same species that have originated through duplication of an ancestral gene; orthologues are genes from different organisms that have originated through speciation, and are also derived from a common ancestral gene. A non-limiting list of examples of such orthologues is shown in Table 1. It will be understood by the person skilled in the art that the sequences of SEQ ID NOs: 2, 3, 4, 5, 6, 7, 8, 9, 10, 11, 12, 13, 14, 15, 16, 17, 18, 19, 20, 21, 22, 23, 24, 25, 26, 27, 28, 29, 30, 31, 32, 33, 34, 35, 36, 37, 38, 39, 40, 41, 42, 43, 44, 45, 46, 47, 48, 49, 50, 51, 52, 53, 54, 55, 56, 57, 58, 59, 60, 61, 62, 63, 64, 65, 66, 67, 68, 69, 70, 71, 72, 73, 74, 75, 76, 77, 78, 79, 80, 81, 82 or 83, as listed in Table 1 represent orthologues and paralogues to SEQ ID NO:1.

[0105] It is well-known in the art that paralogues and orthologues may share distinct domains harboring suitable amino acid residues at given sites, such as binding pockets for particular substrates or binding motifs for interaction with other proteins.

[0106] The term “domain” refers to a set of amino acids conserved at specific positions along an alignment of sequences of evolutionarily related proteins. While amino acids at other positions can vary between homologues, amino acids that are highly conserved at specific positions indicate amino acids that are likely essential in the structure, stability or function of a protein. Identified by their high degree of conservation in aligned sequences of a family of protein homologues, they can be used as identifiers to determine if any polypeptide in question belongs to a previously identified polypeptide family.

[0107] The term “motif” or “consensus sequence” refers to a short conserved region in the sequence of evolutionarily related proteins. Motifs are frequently highly conserved parts of domains, but may also include only part of the domain, or be located outside of conserved domain (if all of the amino acids of the motif fall outside of a defined domain).

| i) | Motif 1a: |
|---|---|
| (SEQ ID NO: 99) | |
| | L[C/G/M/S][F/V/L/I]F[L/F][Q/H/R]YR[T/V/C/I][T/S/M/L][H/N]P[V/A][K/N/P/R/T/E][N/D]A |
| | [Y/F][P/G/A/T]LWL[T/V/I/L]SVICE[I/V]WFA[F/L/I/V/M]SW. |
| (motif ib; SEQ ID NO: 100) | |
| | Preferably said motif is |
| | L[C/G/M/S][F/V/L/I]F[L/F][Q/H]YR[T/V/C/I][T/S/L][H/N]PV[K/N/P/R/T/E][N/D]A[Y/F] |
| | [P/G/A/T]LWL[T/V/I/L]SVICE[I/V]WFA[F/L/I/V]SW. |
| | More preferably said motif is |
| (motif 1c; SEQ ID NO: 101) | |
| | L[C/G/M][F/V]F[L/F][Q/H]YR[T/V/C/I][T/S]HPV[K/N/R/E][N/D]AY[P/G/A]LWL[T/V]SVI |
| | CE[I/V]WFA[F/L]SW |
| ii) | Motif 2a: |
| (SEQ ID NO: 102) | |
| | YC[I/T/V/M/S/A]LPA[F/V/I]CL[I/L/F]T]D/N/G][R/K/T/Q[FI[I/V/T]P[E/A/Q/K][I/L][S/N/T] |
| | N[Y/F/L/I/A][A/E][S/G][I/M/L/A/V][W/C/F/L/V/I]F[I/M/L/V][L/S][L/S/A]F[I/V/A/L/S/M/G] |
| | [S/C]I |
| | Preferably, said motif is |
| (motif 2b; SEQ ID NO: 103) | |
| | YC[I/T/V/M]LPA[F/V/I[CL][I/L/F]T[D/N/G][R/K/T/Q]FIIP[E/A/Q/K]ISN[Y/F/L/I][A/E][S/G] |
| | [I/M/L/A/V][W/C/F]F[I/M/L][L/S]LF[I/V/A/L]SI; |
| | More preferably said motif is |
| (motif 2c; SEQ ID NO: 104) | |
| | YC[I/T/V/M]LPA[F/V/I]CL[I/L]T[D/N/G][R/K/T]FIIP[E/A]ISN[Y/F/L]A[S/G][I/M/L/A] |
| | [W/C/F]F[I/M]LLF[I/V/A]SI |
| iii) | Motif 3a: |
| (SEQ ID NO: 105) | |
| | VIGG[T/V/I/A]S[A/S]H[L/F][F/L]A[V/L][F/V][Q/L]G[L/I/M][L/F]KV[L/F/I]AG[I/V] |
| | [D/N/S/E/K]T[N/S]F[T/I]V[T/A]SK |
| | Preferably, said motif is |
| (motif 3b; SEQ ID NO: 106); | |
| | VIGG[T/V/I]SAHLFAVQG[L/I]LKV[L/F]AGIDT[N/S]FTVTSK; |
| | More preferably said motif is |
| (motif 3c; SEQ ID NO: 107) | |
| | VIGGTSAHLFAVFQGLLKV[L/F]AGIDTNFTVTSK |
| iv) | Motif 4a: |
| (SEQ ID NO: 108) | |
| | A[V/I][N/S][S/N]G[Y/F][Q/D/E]SWGPL[F/M/L]G[K/R]L[F/L]F[A/S][L/I/F]WV[I/V][A/V/I/L] |
| | HLYPFLGK[L/M/V][L/M/V(I] |
| | Preferably, said motif is |
| (motif 4b; SEQ ID NO: 109) | |
| | A[V/I]NSGYQSWGPL[F/M]GKL[F/L]F[A/S][L/I/F]WV[I/V][A/V/I/L]HLYPFLKGL[L/M]G; |
| | More preferably said motif is |
| (motif 4c; SEQ ID NO: 110) | |
| | A[V/I]NSGYQSWGPL[F/M]GKL[F/L]F[A/S][L/I/F]WV[I/V][A/V/L]HLYPFLKGL[L/M]G |
| v) | Motif 5a: |
| (SEQ ID NO: 111) | |
| | [G/A][I/M/V][V/I][A/S/V]G[V/I/F]S[Y/T/D/N]A[V/I][N/S][S/N]G[Y/F] |
| | Preferably, said motif is |
| (motif 5b; SEQ ID NO: 112) | |
| | G[I/M/V]V[A/S]G[V/I/F]S[Y/T]A[V/I]NSGY; |
| | More preferably said motif is |
| (motif 5c; SEQ ID NO: 113) | |
| | GVVAG[V/I/F]SYAINSGY |
| vi) | Motif 6a: |
| (SEQ ID NO: 114) | |
| | [V/I][I/V/L]VW[S/A][V/I/A]L[L/I][A/S]S[I/F][F/L][S/T][L/V][L/M]WV[R/K][I/V][N/D]PF |
| | Preferably, said motif is |
| (motif 6b; SEQ ID NO: 115) | |
| | V[I/V]VW[S/A][V/I/A]LLASIFSL[L/M]WV[R/K]I[N/D]PF; |
| | More preferably said motif is |
| (motif 6c; SEQ ID NO: 116) | |
| | VVVW[S/A][V/I]LLASIFL[L/M]WVRIDPF |
| vii) | Motif 7a: |
| (SEQ ID NO: 117) | |
| | EI[L/F][L/F/M]S[R/K/N]HCP[I/L]WYGY[H/T/N/S/G][G/C][R/K/G]L |
| | Preferably, said motif is |
| (motif 7b; SEQ ID NO: 118) | |
| | EI[L/F][L/F]SRHCP[I/L]WYGY[H/T/N/S/G][G/C][R/K/G]L; |
| | More preferably said motif is |
| (motif 7c; SEQ ID NO: 119) | |
| | EILFSRHCP[I/L]WYGY[N/S/G]GRL |
| viii) | Motif 8a: |
| (SEQ ID NO: 120) | |
| | [F/L]KWT[A/S/T]LLI[P/T]P[T/M/L]T[V/I/L]L |
| | Preferably, said motif is |
| (motif 8b; SEQ ID NO: 121) | |
| | FKWT[A/S/I]LLIPPTT[V/I/L; |
| | More preferably said motif is |
| (motif 8c; SEQ ID NO: 122) | |
| | FKWT[A/S/T]LLIPTT[V/I]L |

[0108] Motifs 1a-c, 2a-c, 3a-c, 4a-c, 5a-c, 6a-c, 7a-c, 8a-c given above were derived using the ClustalW algorithm to generate the alignments of cellulose synthase sequences (FIG. 2 A-C) (Larkin et al., Bioinformatics 23:21 (2007) 2947-2948 pp. 28-36,). The motifs were essentially derived based on sequence alignment (FIG. 2 A-F); highly conserved regions were identified that contain the site of mutations conferring azine-herbicide tolerance. Residues within square brackets represent alternatives.

[0109] In a preferred embodiment, a CESA polypeptide as applied herein comprises, at least 1, at least 2, at least 3, at least 4, at least 5, at least 6, at least 7 motifs selected from the group comprising motifs 1a, 2a, 3a, 4a, 5a, 6a, 7a, and 8a as given above. Alternatively or in addition, in another preferred embodiment, a CESA polypeptide as applied herein comprises at least 1, at least 2, at least 3, at least 4, at least 5, at least 6, at least 7 motifs selected from the group comprising motifs 1b, 2b, 3b, 4b, 5b, 6b, 7b, and 8b as given above. Alternatively or in addition, in another preferred embodiment, a CESA polypeptide as applied herein comprises at least 1, at least 2, at least 3, at least 4, at least 5, at least 6, at least 7 motifs selected from the group comprising motifs 1c, 2c, 3c, 4c, 5c, 6c, 7c, and 8c as given above.

[0110] Additionally or alternatively, the homologue of a CESA protein has in increasing order of preference at least 20%, 21%, 22%, 23%, 24%, 25%, 26%, 27%, 28%, 29%, 30%, 31%, 32%, 33%, 34%, 35%, 36%, 37%, 38%, 39%, 40%, 41%, 42%, 43%, 44%, 45%, 46%, 47%, 48%, 49%, 50%, 51%, 52%, 53%, 54%, 55%, 56%, 57%, 58%, 59%, 60%, 61%, 62%, 63%, 64%, 65%, 66%, 67%, 68%, 69%, 70%, 71%, 72%, 73%, 74%, 75%, 76%, 77%, 78%, 79%, 80%, 81%, 82%, 83%, 84%, 85%, 86%, 87%, 88%, 89%, 90%, 91%, 92%, 93%, 94%, 95%, 96%, 97%, 98%, or 99% overall sequence identity to the amino acid represented by SEQ ID NO: 1, 2, 3, 4, 5, 6, 7, 8, 9, 10, 11, 12, 13, 14, 15, 16, 17, 18, 19, 20, 21, 22, 23, 24, 25, 26, 27, 28, 29, 30, 31, 32, 33, 34, 35, 36, 37, 38, 39, 40, 41, 42, 43, 44, 45, 46, 47, 48, 49, 50, 51, 52, 53, 54, 55, 56, 57, 58, 59, 60, 61, 62, 63, 64, 65, 66, 67, 68, 69, 70, 71, 72, 73, 74, 75, 76, 77, 78, 79, 80, 81, 82 or 83, provided that the homologous protein comprises any one or more of the conserved motifs 1, 2, 3, 4, 5, 6, 7, and/or 8 as outlined above. The overall sequence identity is determined using a global alignment algorithm, such as the Needleman Wunsch algorithm in the program GAP (GCG Wisconsin Package, Accelrys), preferably with default parameters and preferably with sequences of mature proteins (i.e. without taking into account secretion signals or transit peptides). Compared to overall sequence identity, the sequence identity will generally be higher when only conserved domains or motifs are considered. Preferably the motifs in a CESA polypeptide have, in increasing order of preference, at least 70%, 71%, 72%, 73%, 74%, 75%, 76%, 77%, 78%, 79%, 80%, 81%, 82%, 83%, 84%, 85%, 86%, 87%, 88%, 89%, 90%, 91%, 92%, 93%, 94%, 95%, 96%, 97%, 98%, or 99% sequence identity to any one or more of the motifs represented by SEQ ID NO: 99, 100, 101, 102, 103, 104, 105, 106, 107, 108, 109, 110, 111, 112, 113, 114, 115, 116, 117, 118, 119, 120, 121, 122 (Motifs 1a, 1b, 1c, 2a, 2b, 2c, 3a, 3b, 3c, 4a, 4b, 4c, 5a, 5b, 5c, 6a, 6b, 6c, 7a, 7b, 7c, 8a, 8b, 8c,).

[0111] Specialist databases exist for the identification of domains, for example, SMART (Schultz et al. (1998) Proc. Natl. Acad. Sci. USA 95, 5857-5864; Letunic et al. (2002) Nucleic Acids Res 30, 242-244), InterPro (Mulder et al., (2003) Nucl. Acids. Res. 31, 315-318), Prosite (Bucher and Bairoch (1994), A generalized profile syntax for biomolecular sequences motifs and its function in automatic sequence interpretation. (In) ISMB-94; Proceedings 2nd International Conference on Intelligent Systems for Molecular Biology. Altman R., Brutlag D., Karp P., Lathrop R., Searls D., Eds., pp 53-61, AAAI Press, Menlo Park; Hulo et al., Nucl. Acids. Res. 32:D134-D137, (2004)), or Pfam (Bateman et al., Nucleic Acids Research 30(1): 276-280 (2002)). A set of tools for in silico analysis of protein sequences is available on the ExPASy proteomics server (Swiss Institute of Bioinformatics (Gasteiger et al., ExPASy: the proteomics server for in-depth protein knowledge and analysis, Nucleic Acids Res. 31:3784-3788(2003)). Domains or motifs may also be identified using routine techniques, such as by sequence alignment.

[0112] Methods for the alignment of sequences for comparison are well known in the art, such methods include GAP, BESTFIT, BLAST, FASTA and TFASTA. GAP uses the algorithm of Needleman and Wunsch ((1970) J Mol Biol 48: 443-453) to find the global (i.e. spanning the complete sequences) alignment of two sequences that maximizes the number of matches and minimizes the number of gaps. The BLAST algorithm (Altschul et al. (1990) J Mol Biol 215: 403-10) calculates percent sequence identity and performs a statistical analysis of the similarity between the two sequences. The software for performing BLAST analysis is publicly available through the National Centre for Biotechnology Information (NCBI). Homologues may readily be identified using, for example, the ClustalW multiple sequence alignment algorithm (version 1.83), with the default pairwise alignment parameters, and a scoring method in percentage (See FIG. 1). Global percentages of similarity and identity may also be determined using one of the methods available in the MatGAT software package (Campanella et al., BMC Bioinformatics. 2003 Jul. 10; 4:29. MatGAT: an application that generates similarity/identity matrices using protein or DNA sequences.). Minor manual editing may be performed to optimise alignment between conserved motifs, as would be apparent to a person skilled in the art. Furthermore, instead of using full-length sequences for the identification of homologues, specific domains may also be used. The sequence identity values may be determined over the entire nucleic acid or amino acid sequence or over selected domains or conserved motif(s), using the programs mentioned above using the default parameters. For local alignments, the Smith-Waterman algorithm is particularly useful (Smith T F, Waterman M S (1981) J. Mol. Biol 147(1); 195-7).

[0113] The proteins of the invention may be altered in various ways including amino acid substitutions, deletions, truncations, and insertions. Methods for such manipulations are generally known in the art. For example, amino acid sequence variants can be prepared by mutations in the DNA. Methods for mutagenesis and nucleotide sequence alterations are well known in the art. See, for example, Kunkel (1985) PNAS, 82:488-492; Kunkel et al. (1987) Methods in Enzymol. 154:367-382; U.S. Pat. No. 4,873,192; Walker and Gaastra, eds. (1983) Techniques in Molecular Biology (MacMillan Publishing Company, New York) and the references cited therein. Guidance as to appropriate amino acid substitutions that do not affect biological activity of the protein of interest may be found in the model of Dayhoff et al. (1978) Atlas of Protein Sequence and Structure (Natl. Biomed. Res. Found., Washington, D.C), herein incorporated by reference. Conservative substitutions, such as exchanging one amino acid with another having similar properties, may be preferable.

[0114] Alternatively, variant nucleotide sequences can be made by introducing mutations randomly along all or part of a coding sequence, such as by saturation mutagenesis, and the resultant mutants can be screened to identify mutants that encode proteins that retain activity. For example, following mutagenesis, the encoded protein can be expressed recombinantly, and the activity of the protein can be determined using standard assay techniques.

[0115] The inventors of the present invention have found that by substituting one or more of the key amino acid residues of the CESA enzyme of SEQ ID NO: 1, 3, 12, 15, 20, or 21 e.g. by employing one of the above described methods to mutate the CESA encoding nucleic acids, the tolerance or resistance to particular CESA-inhibiting herbicides, collectively named azines, and described in greated detail herein below, could be remarkably increased Preferred substitutions of mutated CESA are those that increase the herbicide tolerance of the plant, but leave the biological activitiy of the cellulose synthase activity substantially unaffected.

[0116] Accordingly, in another object of the present invention refers to a CESA polypeptide, comprising the sequence of SEQ ID NO: 1, 2, 3, 4, 5, 6, 7, 8, 9, 10, 11, 12, 13, 14, 15, 16, 17, 18, 19, 20, 21, 22, 23, 24, 25, 26, 27, 28, 29, 30, 31, 32, 33, 34, 35, 36, 37, 38, 39, 40, 41, 42, 43, 44, 45, 46, 47, 48, 49, 50, 51, 52, 53, 54, 55, 56, 57, 58, 59, 60, 61, 62, 63, 64, 65, 66, 67, 68, 69, 70, 71, 72, 73, 74, 75, 76, 77, 78, 79, 80, 81, 82 or 83, a variant, derivative, orthologue, paralogue or homologue thereof, the key amino acid residues of which is substituted by any other amino acid.

[0117] It will be understood by the person skilled in the art that amino acids located in a close proximity to the positions of amino acids mentioned below may also be substituted. Thus, in another embodiment the variant of SEQ ID NO: 1, 2, 3, 4, 5, 6, 7, 8, 9, 10, 11, 12, 13, 14, 15, 16, 17, 18, 19, 20, 21, 22, 23, 24, 25, 26, 27, 28, 29, 30, 31, 32, 33, 34, 35, 36, 37, 38, 39, 40, 41, 42, 43, 44, 45, 46, 47, 48, 49, 50, 51, 52, 53, 54, 55, 56, 57, 58, 59, 60, 61, 62, 63, 64, 65, 66, 67, 68, 69, 70, 71, 72, 73, 74, 75, 76, 77, 78, 79, 80, 81, 82 or 83, a variant, derivative, orthologue, paralogue or homologue thereof comprises a mutated CESA, wherein an amino acid ±3, ±2 or ±1 amino acid positions from a key amino acid is substituted by any other amino acid.

[0118] Based on techniques well-known in the art, a highly characteristic sequence pattern can be developed, by means of which further of mutated CESA candidates with the desired activity may be searched.

[0119] Searching for further mutated CESA candidates by applying a suitable sequence pattern would also be encompassed by the present invention. It will be understood by a skilled reader that the present sequence pattern is not limited by the exact distances between two adjacent amino acid residues of said pattern. Each of the distances between two neighbours in the above patterns may, for example, vary independently of each other by up to ±10, ±5, ±3, ±2 or ±1 amino acid positions without substantially affecting the desired activity.

[0120] Furthermore, by applying the method of site directed mutagenesis, in particular saturation mutagenes (see e.g. Schenk et al., Biospektrum March 2006, pages 277-279) PCR based site-directed mutagenesis (e.g. directed mutagenesis kit, Stratagene, California, USA or GeneArt Mutagenesis Service, ThermoFisher Scientific Inc., Massachusetts, USA) or systematic mutagenesis (GeneArt Systematic Mutagenesis Service, ThermoFisher Scientific Inc., Massachusetts, USA), the inventors of the present invention have identified and generated specific amino acid subsitutions and combinations thereof, which—when introduced into a plant by transforming and expressing the respective mutated CESA encoding nucleic acid—confer increased herbicide resistance or tolerance to a CESA inhibiting herbicide to said plant.

[0121] Thus, in preferred embodiment, the variant or derivative of the CESA polypeptide refers to a mutated CESA polypeptide which comprises one or more of the following motifs:

| i) | Motif 1a: |
|---|---|
| (SEQ ID NO: 99) | |
| | L[C/G/M/S][F/V/L/I]F[L/F][Q/H/R]YR[T/V/C/I][T/S/M/L][H/N]P[V/A][K/N/P/R/T/E][N/D] |
| | A[Y/F][P/G/A/T]LWL[T/V/I/L]SVICE[I/V]WFA[F/L/I/V/M]SW. |
| | Preferably said motif is |
| (motif 1b; SEQ ID NO: 100) | |
| | L[C/G/M/S][F/V/L/I]F[L/F][Q/H]YR[T/V/C/I][T/S/L][H/N]PV[K/N/P/R/T/E][N/D]A[Y/F] |
| | [P/G/A/T]LWL[T/V/I/L]SVICE[I/V]WFA[F/L/I/V]SW |
| | More preferably said motif is |
| (motif 1c; SEQ ID NO: 101) | |
| | L[C/G/M][F/V]F[L/F][Q/H]YR[T/V/C/I][T/S]HPV[K/N/R/E][N/D]AY[P/G/A]LWL[T/V]SVICE |
| | [I/V]WFA[F/L]SW |
| | Wherein the amino acid at position 8, and/or 23 within said motif of the |
| | corresponding wildtype sequence is substituted by any other amino acid |
| ii) | Motif 2a: |
| (SEQ ID NO: 102) | |
| | YC[I/T/V/M/S/A]LPA[F/V/I]CL[I/L/F]T[D/N/G][R/K/T/Q]F[I/V/T]P[E/A/Q/K][IL][S/N/T]N |
| | [Y/F/L/I/A][A/E][S/G][I/M/L/A/V][W/C/F/L/V/I]F[I/M/L/V][L/S][L/S/A]F[I/V/A/L/S/M/G] |
| | [S/C]I |
| | Preferably, said motif is |
| (motif 2b; SEQ ID NO: 103) | |
| | YC[I/T/V/M]LPA[F/V/I]CL[I/L/F]T[D/N/G][R/K/T/Q]FIIP[E/A/Q/K]ISN[Y/F/L/I][A/E][S/G] |
| | [I/M/L/A/V][W/C/F]F[I/M/L][L/S]LF[I/V/A/L]SI; |
| | More preferably said motif is |
| (motif 2c; SEQ ID NO: 104) | |
| | YC[I/T/VM]LPA[F/V/I]CL[I/L]T[D/N/G][R/K/T]FIIP[E/A]ISN[Y/F/L]A[S/G][I/M/L/A][W/C/F] |
| | F[I/M]LLF[I/V/A]SI |
| | Wherein the amino acid at position 4, 17, and/or 24 within said motif of the |
| | corresponding wildtype sequence is substituted by any other amino acid |
| iii) | Motif 3a: |
| (SEQ ID NO: 105) | |
| | VIGG[T/V/I/A]S[A/S]H[L/F][F/L]A[V/L][F/V][Q/L]G[L/I/M][L/F]KV[L/F/I]AG[I/V][D/N/S/E/ |
| | K]TN[N/S]F[T/I]V[T/A]SK |
| | Preferably, said motif is |
| (motif 3b; SEQ ID NO: 106) | |
| | VIGG[T/V/I]SAHLFAVFQG[L/I]LKV[L/F]AGIDT[N/S]FTVTSK; |
| | More preferably said motif is |
| (motif 3c; SEQ ID NO: 107) | |
| | VIGGTSAHLFAVFQGLLKV[L/F]AGIDTNFTVTSK |
| | Wherein the amino acid at position 1, 3, 18, and/or 28 within said motif of the |
| | corresponding wildtype sequence is substituted by any other amino acid |
| iv) | Motif 4a: |
| (SEQ ID NO: 108) | |
| | A[V/I][N/S][S/N]G[Y/F][Q/D/E]SWGPL[F/M/L]G[K/R]L[F/L]F]A/S][L/I/F]WV[I/V][A/V/I/L] |
| | HLYPFLKG[L/M/V][L]/]V(I] |
| | Preferably, said motif is |
| (motif 4b; SEQ ID NO: 109) | |
| | A[V/I]NSGYQSWGPL[F/M]GKL[F/L]F[A/S][L/I/F]WV[I/V][A/V/I/L]HLYPFLKGL[L/M]G |
| | More preferably said motif is |
| (motif 4c; SEQ ID NO: 110) | |
| | A[V/I]NSGYQSWGPL[F/M]GKL[F/L]F[A/S][L/I/F]WV[I/V][A/V/L]HLYPFLKGL[L/M]G |
| | Wherein the amino acid at position 9, 12, 13, 15, 19, and/or 24 within said motif of |
| | the corresponding wildtype sequence is substituted by any other amino acid |
| v) | Motif 5a: |
| (SEQ ID NO: 111) | |
| | [G/A][I/M/V][V/I][A/S/V]G[V/I/F]S[Y/T/D/N]A[V/I][N/S][S/N]G[Y/F] |
| | Preferably, said motif is |
| (motif 5b; SEQ ID NO: 112) | |
| | G[I/M/V]V[A/S]G[V/I/F]S[Y/I]A[V/I]NSGY; |
| | More preferably said motif is |
| (motif 5c; SEQ ID NO: 113) | |
| | GVVAGN[V/I/F]SYAINSGY |
| | Wherein the amino acid at position 8 within said motif of the corresponding wildtype |
| | sequence is substituted by any other amino acid |
| vi) | Motif 6a: |
| (SEQ ID NO: 114) | |
| | [V/I][I/V/L]LW[S/A][V/I/A]L[L/I][A/S]S[I/F][F/L][S/T][L/V][L/M]WV[R/K][I/V][N/D]PF |
| | Preferably, said motif is |
| (motif 6b; SEQ ID NO: 115) | |
| | V[I/V]VW[S/A][V/I/A/]LLASIFSL[L/M]WV[R/K]I[N/D]PF; |
| | More preferably said motif is |
| (motif 6c; SEQ ID NO: 116) | |
| | VVVW[S/A][V/I]LLASIFSL[L/M]WVRIDPF |
| | Wherein the amino acid at position 9, 11, 12, and/or 14 within said motif of the |
| | corresponding wildtype sequence is substituted by any other amino acid |
| vii) | Motif 7a: |
| (SEQ ID NO: 117) | |
| | EI[L/F][L/F/M]S[R/K/N]HCP[I/L]WYGY[H/T/NS/G][G/C][R/K/G]L |
| | Preferably, said motif is |
| (motif 7b; SEQ ID NO: 118) | |
| | EI[L/F][L/F]SRHCP[I/L]WYGY[H/T/N/S/G][G/C][R/K/G]L |
| | More preferably said motif is |
| (motif 7c; SEQ ID NO: 119) | |
| | EILFSRHCP[I/L]WYGY[N/S/G]GRL |
| | Wherein the amino acid at position 5, 13, 15, and/or 16 within said motif of the |
| | corresponding wildtype sequence is substituted by any other amino acid |
| viii) | Motif 8a: |
| (SEQ ID NO: 120) | |
| | [F/L]KWT[A/S/T]LLI[P/T]P[T/M/L]T[V/I/L]L |
| | Preferably, said motif is |
| (motif 8b; SEQ ID NO: 121) | |
| | FKWT[A/S/T]LLIPPTT[V/I/L]L; |
| | More preferably said motif is |
| | (motif 8c; SEQ ID NO: 122) |
| | FKWT[A/S/T]LLIPPTT[V/I]L |
| | Wherein the amino acid at position 10 within said motif of the corresponding |
| | wildtype sequence is substituted by any other amino acid |

[0122] In a more preferred embodiment, the amino acid corresponding to position 8 of motif 1a, 1b, or 1c is:

[0123] Ala, Asn, Asp, Cys, Gln, Glu, Gly, His, Ile, Leu, Lys, Met, Phe, Pro, Ser, Thr, Trp, Tyr, or Val

[0124] And/or

[0125] the amino acid corresponding to position 23 of motif 1a, 1b, or 1c is

[0126] Ala, Arg, Asn, Asp, Cys, Gln, Glu, Gly, His, Ile, Leu, Lys, Met, Phe, Pro, Thr, Trp, Tyr, or Val

[0127] In another more preferred embodiment, the amino acid corresponding to position 4 of motif 2a, 2b, or 2c is:

[0128] Ala, Arg, Asn, Asp, Cys, Gln, Glu, Gly, His, Ile, Lys, Met, Phe, Pro, Ser, Thr, Trp, Tyr, or Val

[0129] And/or

[0130] the amino acid corresponding to position 17 of motif 2a, 2b, or 2c is

[0131] Ala, Arg, Asn, Asp, Cys, Gln, Glu, Gly, His, Ile, Leu, Lys, Met, Phe, Ser, Thr, Trp, Tyr, or Val

[0132] And/or

[0133] the amino acid corresponding to position 24 of motif 2a, 2b, or 2c is

[0134] Ala, Arg, Asn, Asp, Cys, Gln, Glu, Gly, His, Ile, Leu, Lys, Met, Phe, Pro, Thr, Trp, Tyr, Val

[0135] In another more preferred embodiment, the amino acid corresponding to position 1 of motif 3a, 3b, or 3c is:

[0136] Ala, Arg, Asn, Asp, Cys, Gln, Glu, Gly, His, Ile, Leu, Lys, Met, Phe, Pro, Ser, Thr, Trp, or Tyr,

[0137] And/or

[0138] the amino acid corresponding to position 3 of motif 3a, 3b, or 3c is

[0139] Ala, Arg, Asn, Asp, Cys, Gln, Glu, His, Ile, Leu, Lys, Met, Phe, Pro, Ser, Thr, Trp, Tyr, or Val

[0140] And/or

[0141] the amino acid corresponding to position 18 of motif 3a, 3b, or 3c is

[0142] Ala, Arg, Asn, Asp, Cys, Gln, Glu, Gly, His, Ile, Leu, Met, Phe, Pro, Ser, Thr, Trp, Tyr, or Val

[0143] And/or

[0144] the amino acid corresponding to position 28 of motif 3a, 3b, or 3c is

[0145] Ala, Arg, Asn, Asp, Cys, Gln, Glu, Gly, His, Ile, Leu, Lys, Met, Phe, Pro, Ser, Trp, Tyr, or Val

[0146] In another more preferred embodiment, the amino acid corresponding to position 9 of motif 4a, 4b, or 4c is:

[0147] Ala, Arg, Asn, Asp, Cys, Gln, Glu, Gly, His, Ile, Leu, Lys, Met, Phe, Pro, Ser, Thr, Tyr, or Val

[0148] And/or

[0149] the amino acid corresponding to position 12 of motif 4a, 4b, or 4c is

[0150] Ala, Arg, Asn, Asp, Cys, Gln, Glu, Gly, His, Ile, Lys, Met, Phe, Pro, Ser, Thr, Trp, Tyr, or Val

[0151] And/or

[0152] the amino acid corresponding to position 13 of motif 4a, 4b, or 4c is

[0153] Ala, Arg, Asn, Asp, Cys, Gln, Glu, Gly, His, Ile, Leu, Lys, Met, Pro, Ser, Thr, Trp, Tyr, or Val

[0154] And/or

[0155] the amino acid corresponding to position 15 of motif 4a, 4b, or 4c is

[0156] Ala, Arg, Asn, Asp, Cys, Gln, Glu, Gly, His, Ile, Leu, Met, Phe, Pro, Ser, Thr, Trp, Tyr, or Val

[0157] And/or

[0158] the amino acid corresponding to position 19 of motif 4a, 4b, or 4c is

[0159] Arg, Asn, Asp, Cys, Gln, Glu, Gly, His, Ile, Leu, Lys, Met, Phe, Pro, Ser, Thr, Trp, Tyr, or Val

[0160] And/or

[0161] the amino acid corresponding to position 24 of motif 4a, 4b, or 4c is

[0162] Arg, Asn, Asp, Cys, Gln, Glu, Gly, His, Ile, Leu, Lys, Met, Phe, Pro, Ser, Thr, Trp, Tyr, or Val.

[0163] In another more preferred embodiment, the amino acid corresponding to position 8 of motif 5a, 5b, or 5c is:

[0164] Ala, Arg, Asn, Asp, Cys, Gln, Glu, Gly, His, Ile, Leu, Lys, Met, Phe, Pro, Ser, Thr, Trp, or Val

[0165] In another more preferred embodiment, the amino acid corresponding to position 9 of motif 6a, 6b, or 6c is:

[0166] Arg, Asn, Asp, Cys, Gln, Glu, Gly, His, Ile, Leu, Lys, Met, Phe, Pro, Ser, Thr, Trp, Tyr, or Val

[0167] And/or

[0168] the amino acid corresponding to position 11 of motif 6a, 6b, or 6c is

[0169] Ala, Arg, Asn, Asp, Cys, Gln, Glu, Gly, His, Leu, Lys, Met, Phe, Pro, Ser, Thr, Trp, Tyr, or Val

[0170] And/or

[0171] the amino acid corresponding to position 12 of motif 6a, 6b, or 6c is

[0172] Ala, Arg, Asn, Asp, Cys, Gln, Glu, Gly, His, Ile, Leu, Lys, Met, Pro, Ser, Thr, Trp, Tyr, or Val

[0173] And/or

[0174] the amino acid corresponding to position 14 of motif 6a, 6b, or 6c is

[0175] Ala, Arg, Asn, Asp, Cys, Gln, Glu, Gly, His, Ile, Lys, Met, Phe, Pro, Ser, Thr, Trp, Tyr, or Val

[0176] In another more preferred embodiment, the amino acid corresponding to position 5 of motif 7a, 7b, or 7c is:

[0177] Ala, Arg, Asn, Asp, Cys, Gln, Glu, Gly, His, Ile, Leu, Lys, Met, Phe, Pro, Thr, Trp, Tyr, or Val

[0178] And/or

[0179] the amino acid corresponding to position 13 of motif 7a, 7b, or 7c is

[0180] Ala, Arg, Asn, Asp, Cys, Gln, Glu, His, Ile, Leu, Lys, Met, Phe, Pro, Ser, Thr, Trp, Tyr, or Val

[0181] And/or

[0182] the amino acid corresponding to position 15 of motif 7a, 7b, or 7c is

[0183] Ala, Arg, Asn, Cys, Gln, Glu, Gly, His, Ile, Leu, Lys, Met, Phe, Pro, Ser, Thr, Trp, Tyr, or Val

[0184] And/or

[0185] the amino acid corresponding to position 16 of motif 7a, 7b, or 7c is

[0186] Ala, Arg, Asn, Asp, Cys, Gln, Glu, His, Ile, Leu, Lys, Met, Phe, Pro, Ser, Thr, Trp, Tyr, or Val

[0187] In another more preferred embodiment, the amino acid corresponding to position 10 of motif 8a, 8b, or 8c is:

[0188] Ala, Arg, Asn, Asp, Cys, Gln, Glu, Gly, His, Ile, Leu, Lys, Met, Phe, Ser, Thr, Trp, Tyr, or Val

[0189] In a particularly preferred embodiment,

[0190] the amino acid corresponding to position 8 of motif 1a, 1b, or 1c is His

[0191] And/or

[0192] the amino acid corresponding to position 23 of motif 1a, 1b, or 1c is Leu.

[0193] In another particularly preferred embodiment, the amino acid corresponding to position 4 of motif 2a, 2b, or 2c is: Phe

[0194] And/or

[0195] the amino acid corresponding to position 17 of motif 2a, 2b, or 2c is Ser.

[0196] And/or

[0197] the amino acid corresponding to position 24 of motif 2a, 2b, or 2c is Asn.

[0198] In another particularly preferred embodiment, the amino acid corresponding to position 1 of motif 3a, 3b, or 3c is: Ile

[0199] And/or

[0200] the amino acid corresponding to position 3 of motif 3a, 3b, or 3c is Asp

[0201] And/or

[0202] the amino acid corresponding to position 18 of motif 3a, 3b, or 3c is Arg

[0203] And/or

[0204] the amino acid corresponding to position 28 of motif 3a, 3b, or 3c is Ile.

[0205] In another particularly preferred embodiment, the amino acid corresponding to position 9 of motif 4a, 4b, or 4c is: Ala or Phe,

[0206] And/or

[0207] the amino acid corresponding to position 12 of motif 4a, 4b, or 4c is Ala or Phe,

[0208] And/or

[0209] the amino acid corresponding to position 13 of motif 4a, 4b, or 4c is Leu or Tyr

[0210] And/or

[0211] the amino acid corresponding to position 15 of motif 4a, 4b, or 4c is Arg or Gln,

[0212] And/or

[0213] the amino acid corresponding to position 19 of motif 4a, 4b, or 4c is Val

[0214] And/or

[0215] the amino acid corresponding to position 24 of motif 4a, 4b, or 4c is Thr.

[0216] In another particularly preferred embodiment, the amino acid corresponding to position 8 of motif 5a, 5b, or 5c is: Asp.

[0217] In another more preferred embodiment, the amino acid corresponding to position 9 of motif 6a, 6b, or 6c is: Leu or Phe

[0218] And/or

[0219] the amino acid corresponding to position 11 of motif 6a, 6b, or 6c is Ala or Phe

[0220] And/or

[0221] the amino acid corresponding to position 12 of motif 6a, 6b, or 6c is Leu

[0222] And/or

[0223] the amino acid corresponding to position 14 of motif 6a, 6b, or 6c is Ala or Phe

[0224] In another particularly preferred embodiment, the amino acid corresponding to position 5 of motif 7a, 7b, or 7c is: Asn,

[0225] And/or

[0226] the amino acid corresponding to position 13 of motif 7a, 7b, or 7c is Asp

[0227] And/or

[0228] the amino acid corresponding to position 15 of motif 7a, 7b, or 7c is Glu,

[0229] And/or

[0230] the amino acid corresponding to position 16 of motif 7a, 7b, or 7c is Glu

[0231] In another particularly preferred embodiment, the amino acid corresponding to position 10 of motif 8a, 8b, or 8c is: Ser.

[0232] In another embodiment, the variant or derivative of the CESA polypeptide refers to a CESA polypeptide comprising SEQ ID NO: 1, a orthologue, paralogue, or homologue thereof, wherein the amino acid sequence differs from the wildtype amino acid sequence of a CESA polypeptide at one or more positions corresponding to the following positions of SEQ ID NO:1:

[0233] 292, 297, 307, 872, 892, 945, 1008, 1011, 1012, 1014, 1018, 1023, 1031.

[0234] Examples of differences at these amino acid positions include, but are not limited to, one or more of the following:

[0235] the amino acid at or corresponding to position 292 is other than arginine;

[0236] the amino acid at or corresponding to position 297 is other than valine;

[0237] the amino acid at or corresponding to position 307 is other than serine;

[0238] the amino acid at or corresponding to position 872 is other than leucine;

[0239] the amino acid at or corresponding to position 892 is other than serine,

[0240] the amino acid at or corresponding to position 945 is other than lysine,

[0241] the amino acid at or corresponding to position 1008 is other than tryptophan,

[0242] the amino acid at or corresponding to position 1011 is other than leucine;

[0243] the amino acid at or corresponding to position 1012 is other than phenylalanine;

[0244] the amino acid at or corresponding to position 1014 is other than lysine;

[0245] the amino acid at or corresponding to position 1018 is other than alanine,

[0246] the amino acid at or corresponding to position 1023 is other than alanine,

[0247] the amino acid at or corresponding to position 1031 is other than glycine;

[0248] In some embodiments, the mutated CESA enzyme comprising SEQ ID NO: 1, a orthologue, paralogue, or homologue thereof, comprises one or more of the following:

[0249] the amino acid at or corresponding to position 292 is Ala, Asn, Asp, Cys, Gln, Glu, Gly, His, Ile, Leu, Lys, Met, Phe, Pro, Ser, Thr, Trp, Tyr, or Val;

[0250] the amino acid at or corresponding to position 297 is Ala, Asn, Asp, Cys, Gln, Glu, Gly, His, Ile, Leu, Lys, Met, Phe, Pro, Ser, Thr, Trp, Tyr, or Arg;

[0251] the amino acid at or corresponding to position 307 is Ala, Arg, Asn, Asp, Cys, Gln, Glu, Gly, His, Ile, Leu, Lys, Met, Phe, Pro, Thr, Trp, Tyr, or Val;

[0252] the amino acid at or corresponding to position 872 is Ala, Arg, Asn, Asp, Cys, Gln, Glu, Gly, His, Ile, Lys, Met, Phe, Pro, Ser, Thr, Trp, Tyr, or Val;

[0253] the amino acid at or corresponding to position 892 is Ala, Arg, Asn, Asp, Cys, Gln, Glu, Gly, His, Ile, Leu, Lys, Met, Phe, Pro, Thr, Trp, Tyr, or Val;

[0254] the amino acid at or corresponding to position 945 is Ala, Arg, Asn, Asp, Cys, Gln, Glu, Gly, His, Ile, Leu, Met, Phe, Pro, Ser, Thr, Trp, Tyr, or Val;

[0255] the amino acid at or corresponding to position 1008 is Ala, Arg, Asn, Asp, Cys, Gln, Glu, Gly, His, Ile, Leu, Lys, Met, Phe, Pro, Ser, Thr, Tyr, or Val;

[0256] the amino acid at or corresponding to position 1011 is Ala, Arg, Asn, Asp, Cys, Gln, Glu, Gly, His, Ile, Lys, Met, Phe, Pro, Ser, Thr, Trp, Tyr, or Val;

[0257] the amino acid at or corresponding to position 1012 is Ala, Arg, Asn, Asp, Cys, Gln, Glu, Gly, His, Ile, Leu, Lys, Met, Pro, Ser, Thr, Trp, Tyr, or Val;

[0258] the amino acid at or corresponding to position 1014 is Ala, Arg, Asn, Asp, Cys, Gln, Glu, Gly, His, Ile, Leu, Met, Phe, Pro, Ser, Thr, Trp, Tyr, or Val;

[0259] the amino acid at or corresponding to position 1018 is Arg, Asn, Asp, Cys, Gln, Glu, Gly, His, Ile, Leu, Lys, Met, Phe, Pro, Ser, Thr, Trp, Tyr, or Val;

[0260] the amino acid at or corresponding to position 1023 is Arg, Asn, Asp, Cys, Gln, Glu, Gly, His, Ile, Leu, Lys, Met, Phe, Pro, Ser, Thr, Trp, Tyr, or Val;

[0261] the amino acid at or corresponding to position 1031 is Arg, Asn, Asp, Cys, Gln, Glu, Ala, His, Ile, Leu, Lys, Met, Phe, Pro, Ser, Thr, Trp, Tyr, or Val;

[0262] In a preferred embodiment, the amino acid at or corresponding to position 292 of SEQ ID NO: 1 is His.

[0263] In a preferred embodiment, the amino acid at or corresponding to position 297 of SEQ ID NO: 1 is Met.

[0264] In another preferred embodiment, the amino acid at or corresponding to position 307 of SEQ ID NO: 1 is Leu,

[0265] In another preferred embodiment, the amino acid at or corresponding to position 872 of SEQ ID NO: 1 is Phe,

[0266] In another preferred embodiment, the amino acid at or corresponding to position 892 of SEQ ID NO: 1 is Asn,

[0267] In another preferred embodiment, the amino acid at or corresponding to position 945 of SEQ ID NO: 1 is Arg,

[0268] In another preferred embodiment, the amino acid at or corresponding to position 1008 of SEQ ID NO: 1 is Phe or Ala

[0269] In another preferred embodiment, the amino acid at or corresponding to position 1011 of SEQ ID NO: 1 is Phe or Ala;

[0270] In another preferred embodiment, the amino acid at or corresponding to position 1012 of SEQ ID NO: 1 is Leu or Tyr;

[0271] In another preferred embodiment, the amino acid at or corresponding to position 1014 of SEQ ID NO: 1 is Arg, or Gln;

[0272] In another preferred embodiment, the amino acid at or corresponding to position 1018 of SEQ ID NO: 1 is Val;

[0273] In another preferred embodiment, the amino acid at or corresponding to position 1023 of SEQ ID NO: 1 is Thr.

[0274] In another preferred embodiment, the amino acid at or corresponding to position 1031 of SEQ ID NO: 1 is Arg.

[0275] In another embodiment, the variant or derivative of the CESA polypeptide refers to a CESA polypeptide comprising SEQ ID NO: 3, a orthologue, paralogue, or homologue thereof, wherein the amino acid sequence differs from the wildtype amino acid sequence of a CESA polypeptide at one or more positions corresponding to the following positions of SEQ ID NO:3:

[0276] 984, 1036, 1038, 1039, 1041.

[0277] Examples of differences at these amino acid positions include, but are not limited to, one or more of the following:

[0278] the amino acid at or corresponding to position 984 is other than tyrosine;

[0279] the amino acid at or corresponding to position 1036 is other than alanine;

[0280] the amino acid at or corresponding to position 1038 is other than isoleucine;

[0281] the amino acid at or corresponding to position 1039 is other than phenylalanine,

[0282] the amino acid at or corresponding to position 1041 is other than Leucine,

[0283] In some embodiments, the mutated CESA enzyme comprising SEQ ID NO: 3, a orthologue, paralogue, or homologue thereof, comprises one or more of the following:

[0284] the amino acid at or corresponding to position 984 is Ala, Arg, Asn, Asp, Cys, Gln, Glu, Gly, His, Ile, Leu, Lys, Met, Phe, Pro, Ser, Thr, Trp, or Val

[0285] the amino acid at or corresponding to position 1036 is Arg, Asn, Asp, Cys, Gln, Glu, Gly, His, Ile, Leu, Lys, Met, Phe, Pro, Ser, Thr, Trp, Tyr, or Val

[0286] the amino acid at or corresponding to position 1038 is Ala, Arg, Asn, Asp, Cys, Gln, Glu, Gly, His, Leu, Lys, Met, Phe, Pro, Ser, Thr, Trp, Tyr, or Val

[0287] the amino acid at or corresponding to position 1039 is Ala, Arg, Asn, Asp, Cys, Gln, Glu, Gly, His, Ile, Leu, Lys, Met, Pro, Ser, Thr, Trp, Tyr, Val

[0288] the amino acid at or corresponding to position 1041 is Ala, Arg, Asn, Asp, Cys, Gln, Glu, Gly, His, Ile, Lys, Met, Phe, Pro, Ser, Thr, Trp, Tyr, Val

[0289] In a preferred embodiment, the amino acid at or corresponding to position 984 of SEQ ID NO: 3 is Asp,

[0290] In another preferred embodiment, the amino acid at or corresponding to position 1036 of SEQ ID NO: 3 is Leu or Phe

[0291] In another preferred embodiment, the amino acid at or corresponding to position 1038 of SEQ ID NO: 3 is Ala, or Phe,

[0292] In another preferred embodiment, the amino acid at or corresponding to position 1039 of SEQ ID NO: 3 is Leu,

[0293] n another preferred embodiment, the amino acid at or corresponding to position 1041 of SEQ ID NO: 3 is Ala, or Phe,

[0294] It will be within the knowledge of the skilled artisan to identify conserved regions and motifs shared between the homologues, orthologues and paralogues encoded by SEQ ID NO: 84, 85, 86, 87, 88, 89, 90, 91, 92, 93, 94, 95, 96, 97, or 98, such as those depicted in Table 1. Having identified such conserved regions that may represent suitable binding motifs, amino acids corresponding to the amino acids listed below in Table 2, can be chosen to be subsituted by any other amino acid, for example by conserved amino acids, preferably by the amino acid substitutions described SUPRA using SEQ ID NO:1 or 3 as reference.

[0295] Table 2 A and B provide an overview of positions in the orthologues and homologues to SEQ ID NO:1 or SEQ ID NO:3, i.e. the corresponding positions in SEQ ID NOs: 1 to 83.

TABLE 2 A

| ID | Pos 1 | Pos 2 | Pos 3 | Pos 4 | Pos 5 | Pos 6 | Pos 7 | Pos 8 | Pos 9 | Pos 10 | Pos 11 | Pos 12 | Pos 13 |
|---|---|---|---|---|---|---|---|---|---|---|---|---|---|
| 1 | R292 | S307 | L872 | S892 | K945 | W1008 | L1011 | F1012 | K1014 | A1018 | A1023 | V297 | G1031 |
| 2 | R294 | S309 | L876 | G896 | K949 | W1011 | L1014 | F1015 | R1017 | A1021 | V1026 | V299 | G1034 |
| 3 | R276 | S291 | L857 | S877 | K930 | W993 | L996 | F997 | K999 | A1003 | V1008 | V281 | G1016 |
| 4 | R232 | S247 | I840 | S860 | K913 | W977 | L980 | F981 | K983 | A987 | V992 | A237 | G1000 |
| 5 | R281 | S296 | L862 | S882 | K935 | W997 | L1000 | F1001 | R1003 | A1007 | L1012 | V286 | G1020 |
| 6 | R293 | S308 | L877 | S897 | K950 | W1012 | L1015 | F1016 | R1018 | A1022 | I1027 | V298 | G1035 |
| 7 | R255 | S270 | L819 | S839 | K892 | W954 | L957 | F958 | K960 | S964 | V969 | V260 | G977 |
| 8 | R201 | S216 | L776 | S796 | K849 | W911 | L914 | F915 | K917 | A921 | L926 | V206 | G934 |
| 9 | R299 | S314 | L880 | G900 | K953 | W1015 | L1018 | F1019 | R1021 | A1025 | V1030 | V304 | G1038 |
| 10 | R279 | S294 | L859 | S879 | K932 | W995 | L998 | M999 | K1001 | A1005 | A1010 | V284 | G1018 |
| 11 | R287 | S302 | L865 | G885 | K938 | W1001 | L1004 | F1005 | K1007 | S1011 | L1016 | V292 | G1024 |
| 12 | R200 | S215 | L775 | T795 | K848 | W910 | L913 | F914 | K916 | A920 | M925 | V205 | G933 |
| 13 | R287 | S302 | L865 | G885 | K938 | W1001 | L1004 | F1005 | K1007 | A1011 | L1016 | V292 | G1024 |
| 14 | R290 | S305 | L878 | S898 | K951 | W1013 | L1016 | F1017 | K1019 | A1023 | V1028 | V295 | G1036 |
| 15 | R282 | S297 | L847 | S867 | K920 | W984 | L987 | F988 | K990 | A994 | V999 | V287 | G1007 |
| 16 | R291 | S306 | L869 | S889 | K942 | W1005 | L1008 | F1009 | K1011 | A1015 | V1020 | V296 | G1028 |
| 17 | R298 | S313 | L886 | S906 | K959 | W1021 | L1024 | F1025 | K1027 | A1031 | V1036 | A303 | G1044 |
| 18 | — | — | L388 | S408 | K461 | W524 | L527 | F528 | K530 | A534 | V539 | — | G547 |
| 19 | R286 | S301 | L875 | S895 | K948 | W1010 | L1013 | F1014 | K1016 | A1020 | V1025 | V291 | G1033 |
| 20 | R293 | S308 | L871 | S891 | K944 | W1007 | L1010 | F1011 | K1013 | A1017 | V1022 | V298 | G1030 |
| 21 | R200 | S215 | L775 | T795 | K848 | W910 | L913 | F914 | K916 | A920 | M925 | V205 | G933 |
| 22 | R298 | S313 | — | — | — | — | — | — | — | — | — | A303 | — |
| 23 | R288 | S303 | L866 | G886 | K939 | W1002 | L1005 | F1006 | K1008 | S1012 | L1017 | V293 | G1025 |
| 24 | R290 | S305 | L868 | S888 | K941 | W1004 | L1007 | F1008 | K1010 | A1014 | V1019 | V295 | G1027 |
| 25 | R291 | S306 | L881 | S901 | K954 | W1016 | L1019 | F1020 | K1022 | A1026 | V1031 | V296 | G1039 |
| 26 | R263 | S278 | L826 | G846 | K899 | W961 | L964 | F965 | K967 | S971 | V976 | V268 | G984 |
| 27 | R288 | S303 | L871 | S891 | K944 | W1006 | L1009 | F1010 | R1012 | A1016 | V1021 | V293 | G1029 |
| 28 | R289 | S304 | L871 | S891 | K944 | W1007 | L1010 | F1011 | K1013 | A1017 | I1022 | V294 | G1030 |
| 29 | R224 | S239 | I764 | S784 | R837 | W901 | L904 | L905 | K907 | S911 | I916 | V229 | G924 |
| 30 | R194 | S209 | L766 | S786 | K839 | W901 | L904 | F905 | K907 | A911 | F916 | V199 | G924 |
| 31 | R270 | S285 | L832 | G852 | K905 | W967 | L970 | F971 | K973 | S977 | V982 | V275 | G990 |
| 32 | — | — | L760 | G780 | K833 | W894 | L897 | L898 | K900 | S904 | L909 | — | G917 |
| 33 | R237 | S252 | I780 | S800 | G853 | W918 | L921 | L922 | K924 | S928 | V933 | V242 | G941 |
| 34 | R296 | S311 | L876 | S896 | K949 | W1012 | L1015 | F1016 | K1018 | A1022 | A1027 | V301 | G1035 |
| 35 | R296 | S311 | L876 | S896 | K949 | W1012 | L1015 | F1016 | K1018 | A1022 | A1027 | V301 | G1035 |
| 36 | R195 | S210 | L767 | S787 | K840 | W902 | L905 | F906 | K908 | A912 | F917 | V200 | G925 |
| 37 | R270 | S285 | L832 | G852 | K905 | W967 | L970 | F971 | K973 | S977 | V982 | V275 | G990 |
| 38 | R305 | S320 | L888 | S908 | K961 | W1023 | L1026 | F1027 | R1029 | A1033 | L1038 | V310 | G1046 |
| 39 | R209 | S224 | L780 | S800 | K853 | W915 | L918 | F919 | K921 | A925 | F930 | V214 | G938 |
| 40 | R263 | S278 | L826 | G846 | K899 | W961 | L964 | F965 | K967 | S971 | V976 | V268 | G984 |
| 41 | R290 | S305 | L872 | S892 | K945 | W1008 | L1011 | F1012 | K1014 | A1018 | I1023 | V295 | G1031 |
| 42 | R197 | S212 | L767 | S787 | K840 | W884 | L887 | F888 | K890 | A894 | F899 | V202 | G907 |
| 43 | R305 | S320 | L888 | S908 | K961 | W1023 | L1026 | F1027 | R1029 | A1033 | L1038 | V310 | G1046 |
| 44 | R283 | S298 | L865 | S885 | K938 | W1001 | L1004 | F1005 | K1007 | A1011 | I1016 | V288 | G1024 |
| 45 | R284 | S299 | L866 | S886 | K939 | W1002 | L1005 | F1006 | K1008 | A1012 | I1017 | V289 | G1025 |
| 46 | R306 | S321 | L888 | S908 | K961 | W1023 | L1026 | F1027 | K1029 | A1033 | V1038 | V311 | G1046 |
| 47 | R288 | S303 | L871 | S891 | K944 | W1006 | L1009 | F1010 | R1012 | A1016 | V1021 | V293 | G1029 |
| 48 | R206 | S221 | L781 | T801 | K854 | W916 | L919 | F920 | K922 | A926 | M931 | V211 | G939 |
| 49 | R286 | S301 | L865 | S885 | K938 | W1001 | L1004 | F1005 | K1007 | A1011 | V1016 | V291 | G1024 |
| 50 | R295 | S310 | L884 | S904 | K957 | W1019 | L1022 | F1023 | K1025 | A1029 | V1034 | V300 | G1042 |
| 51 | R289 | S304 | L867 | G887 | K940 | W1003 | L1006 | F1007 | K1009 | S1013 | L1018 | V294 | G1026 |
| 52 | R333 | S348 | L963 | L983 | K1036 | W1101 | L1104 | L1105 | G1107 | S1111 | A1116 | N338 | G1124 |
| 53 | R172 | S187 | L807 | L827 | K880 | Y945 | L948 | L949 | G951 | S955 | A960 | N177 | G968 |
| 54 | R65 | S80 | L639 | G660 | S713 | W789 | L792 | G793 | K795 | A799 | A804 | V70 | G812 |
| 55 | R293 | S308 | L873 | S893 | K946 | W1009 | L1012 | F1013 | K1015 | A1019 | V1024 | V298 | G1032 |
| 56 | R296 | S311 | L884 | S904 | K957 | W1019 | L1022 | F1023 | K1025 | A1029 | V1034 | V301 | G1042 |
| 57 | R296 | S311 | L885 | S905 | K958 | W1020 | L1023 | F1024 | K1026 | A1030 | V1035 | V301 | G1043 |
| 58 | R40 | S55 | L629 | S649 | K702 | W764 | L767 | F768 | K770 | A774 | V779 | V45 | G787 |
| 59 | R169 | S184 | L758 | S778 | K831 | W893 | L896 | F897 | K899 | A903 | V908 | V174 | G916 |
| 60 | R314 | S329 | I937 | L957 | K978 | W1043 | F1046 | I1047 | G1049 | S1053 | A1058 | N319 | G1066 |
| 61 | R284 | S299 | L846 | S866 | K919 | W983 | L986 | F987 | K989 | A993 | V998 | V289 | G1006 |
| 62 | R230 | S245 | I854 | S874 | K927 | W991 | L994 | F995 | K997 | S1001 | L1006 | A235 | G1014 |
| 63 | R284 | S299 | L918 | L938 | K991 | W1056 | L1059 | L1060 | G1062 | S1066 | A1071 | N289 | G1079 |
| 64 | R344 | S359 | L996 | L1016 | K1069 | W1144 | L1147 | L1148 | G1150 | S1154 | C1159 | N349 | G1167 |
| 65 | R291 | S306 | L875 | S895 | K948 | W1010 | L1013 | F1014 | R1016 | A1020 | I1025 | V296 | G1033 |
| 66 | R277 | S292 | L858 | S878 | K931 | W994 | L997 | F998 | K1000 | A1004 | V1009 | V282 | G1017 |
| 67 | R292 | S307 | L877 | S897 | K950 | W1012 | L1015 | F1016 | R1018 | A1022 | I1027 | V297 | G1035 |
| 68 | R287 | S302 | L872 | S892 | K945 | W1007 | L1010 | F1011 | R1013 | A1017 | I1022 | V292 | G1030 |
| 69 | R293 | S308 | L874 | S894 | K947 | W1010 | L1013 | F1014 | K1016 | A1020 | A1025 | V298 | G1033 |
| 70 | R277 | S292 | L858 | S878 | K931 | W994 | L997 | F998 | K1000 | A1004 | V1009 | V282 | G1017 |
| 71 | R291 | S306 | L875 | S895 | K948 | W1010 | L1013 | F1014 | R1016 | A1020 | I1025 | V296 | G1033 |
| 72 | R287 | S302 | L872 | S892 | K945 | W1007 | L1010 | F1011 | R1013 | A1017 | I1022 | V292 | G1030 |
| 73 | R293 | S308 | L874 | S894 | K947 | W1010 | L1013 | F1014 | K1016 | A1020 | A1025 | V298 | G1033 |
| 74 | R277 | S292 | L858 | S878 | K931 | W994 | L997 | F998 | K1000 | A1004 | V1009 | V282 | G1017 |
| 75 | R290 | S305 | L871 | S891 | K944 | W1007 | L1010 | F1011 | K1013 | A1017 | A1022 | V295 | G1030 |
| 76 | R290 | S305 | L871 | S891 | K944 | W1007 | L1010 | F1011 | K1013 | A1017 | A1022 | V295 | G1030 |
| 77 | R277 | S292 | L858 | S878 | K931 | W994 | L997 | F998 | K1000 | A1004 | V1009 | V282 | G1017 |
| 78 | R292 | S307 | L877 | S897 | K950 | W1012 | L1015 | F1016 | R1018 | A1022 | I1027 | V297 | G1035 |
| 79 | R291 | S306 | L870 | S890 | K943 | W1006 | L1009 | F1010 | K1012 | A1016 | V1021 | V296 | G1029 |
| 80 | R290 | S305 | L873 | S893 | K946 | W1009 | L1012 | F1013 | K1015 | A1019 | V1024 | V295 | G1032 |
| 81 | R271 | S286 | L833 | S853 | K906 | W968 | L971 | F972 | K974 | A978 | L983 | V276 | G991 |
| 82 | R130 | S145 | L713 | S733 | — | — | — | — | — | — | — | V135 | — |
| 83 | — | — | L401 | S421 | K474 | — | — | — | — | — | — | — | — |

TABLE 2B

| ID | Pos 1 | Pos 2 | Pos 3 | Pos 4 | Pos 5 |
|---|---|---|---|---|---|
| 1 | Y999 | A1051 | I1053 | F1054 | L1056 |
| 2 | D1002 | A1054 | I1056 | L1057 | L1059 |
| 3 | Y984 | A1036 | I1038 | F1039 | L1041 |
| 4 | D968 | A1020 | I1022 | F1023 | L1025 |
| 5 | D988 | A1040 | I1042 | L1043 | L1045 |
| 6 | D1003 | A1055 | I1057 | L1058 | L1060 |
| 7 | D945 | A997 | I999 | F1000 | L1002 |
| 8 | D902 | A954 | V956 | F957 | L959 |
| 9 | D1006 | A1058 | I1060 | L1061 | L1063 |
| 10 | Y986 | A1038 | I1040 | F1041 | L1043 |
| 11 | Y992 | A1044 | I1046 | F1047 | L1049 |
| 12 | A901 | A953 | V955 | F956 | L958 |
| 13 | Y992 | A1044 | I1046 | F1047 | L1049 |
| 14 | N1004 | A1056 | I1058 | F1059 | L1061 |
| 15 | D975 | A1027 | I1029 | F1030 | L1032 |
| 16 | Y996 | A1048 | I1050 | F1051 | L1053 |
| 17 | N1012 | A1064 | I1066 | F1067 | L1069 |
| 18 | Y515 | A567 | I569 | F570 | L572 |
| 19 | N1001 | A1053 | I1055 | F1056 | L1058 |
| 20 | Y998 | A1050 | I1052 | F1053 | L1055 |
| 21 | A901 | A953 | V955 | F956 | L958 |
| 22 | — | — | — | — | — |
| 23 | Y993 | A1045 | I1047 | F1048 | L1050 |
| 24 | Y995 | A1047 | I1049 | F1050 | L1052 |
| 25 | N1007 | A1059 | I1061 | F1062 | L1064 |
| 26 | D952 | A1004 | I1006 | F1007 | L1009 |
| 27 | D997 | 31049 | I1051 | L1052 | L1054 |
| 28 | Y998 | A1050 | I1052 | F1053 | L1055 |
| 29 | D892 | A944 | 1946 | F947 | L949 |
| 30 | D892 | A944 | V946 | F947 | L949 |
| 31 | D958 | A1010 | I1012 | F1013 | L1015 |
| 32 | Y885 | A937 | F939 | F940 | V942 |
| 33 | D909 | A961 | I963 | F964 | L966 |
| 34 | Y1003 | A1055 | I1057 | F1058 | L1060 |
| 35 | Y1003 | A1055 | I1057 | F1058 | L1060 |
| 36 | D893 | A945 | V947 | F948 | L950 |
| 37 | D958 | A1010 | I1012 | F1013 | L1015 |
| 38 | D1014 | A1066 | I1068 | L1069 | L1071 |
| 39 | D906 | A958 | V960 | F961 | L963 |
| 40 | D952 | A1004 | I1006 | F1007 | L1009 |
| 41 | Y999 | A1051 | I1053 | F1054 | L1056 |
| 42 | D875 | A927 | V929 | F930 | L932 |
| 43 | D1014 | A1066 | I1068 | L1069 | L1071 |
| 44 | Y992 | A1044 | I1046 | F1047 | L1049 |
| 45 | Y993 | A1045 | I1047 | F1048 | L1050 |
| 46 | D1014 | A1066 | I1068 | F1069 | L1071 |
| 47 | D997 | A1049 | I1051 | L1052 | L1054 |
| 48 | D907 | A959 | V961 | F962 | L964 |
| 49 | Y992 | A1044 | I1046 | F1047 | L1049 |
| 50 | N1010 | A1062 | I1064 | F1065 | L1067 |
| 51 | Y994 | A1046 | I1048 | F1049 | L1051 |
| 52 | R1092 | A1144 | T1146 | I1147 | L1149 |
| 53 | R936 | S988 | T990 | V991 | L993 |
| 54 | Y779 | V833 | V835 | A836 | L838 |
| 55 | Y1000 | A1052 | I1054 | F1055 | L1057 |
| 56 | N1010 | A1062 | I1064 | F1065 | L1067 |
| 57 | N1011 | A1063 | I1065 | F1066 | L1068 |
| 58 | N755 | A807 | I809 | F810 | L812 |
| 59 | N884 | A936 | I938 | F939 | L941 |
| 60 | R1034 | S1086 | T1088 | V1089 | L1091 |
| 61 | D974 | A1026 | I1028 | F1029 | L1031 |
| 62 | D982 | A1034 | I1036 | F1037 | L1039 |
| 63 | R1047 | A1099 | T1101 | I1102 | L1104 |
| 64 | R1135 | 31187 | I1189 | I1190 | L1192 |
| 65 | D1001 | A1053 | I1055 | L1056 | L1058 |
| 66 | Y985 | A1037 | I1039 | F1040 | L1042 |
| 67 | D1003 | A1055 | I1057 | L1058 | L1060 |
| 68 | D998 | A1050 | I1052 | L1053 | L1055 |
| 69 | Y1001 | A1053 | I1055 | F1056 | L1058 |
| 70 | Y985 | A1037 | I1039 | F1040 | L1042 |
| 71 | D1001 | A1053 | I1055 | L1056 | L1058 |
| 72 | D998 | A1050 | I1052 | L1053 | L1055 |
| 73 | Y1001 | A1053 | I1055 | F1056 | L1058 |
| 74 | Y985 | A1037 | I1039 | F1040 | L1042 |
| 75 | Y998 | A1050 | I1052 | F1053 | L1055 |
| 76 | Y998 | A1050 | I1052 | F1053 | L1055 |
| 77 | Y985 | A1037 | I1039 | F1040 | L1042 |
| 78 | D1003 | A1055 | I1057 | L1058 | L1060 |
| 79 | T997 | A1049 | I1051 | F1052 | L1054 |
| 80 | Y1000 | A1052 | I1054 | F1055 | L1057 |
| 81 | D959 | A1011 | I1013 | F1014 | L1016 |
| 82 | — | — | — | — | — |
| 83 | — | — | — | — | — |

[0296] In another embodiment, the variant or derivative of the CESA polypeptide refers to a CESA polypeptide comprising SEQ ID NO: 1, a orthologue, paralogue, or homologue thereof, wherein the amino acid sequence differs from the wildtype amino acid sequence of a CESA polypeptide at one or more positions corresponding to the following positions of SEQ ID NO:1:

[0297] 832, 840, 842, 843, 885, 928, 930, 957, 982.

[0298] Examples of differences at these amino acid positions include, but are not limited to, one or more of the following:

[0299] the amino acid at or corresponding to position 832 is other than serine;

[0300] the amino acid at or corresponding to position 840 is other than glycine;

[0301] the amino acid at or corresponding to position 842 is other than histidine;

[0302] the amino acid at or corresponding to position 843 is other than glycine,

[0303] the amino acid at or corresponding to position 885 is other than proline,

[0304] the amino acid at or corresponding to position 928 is other than valine,

[0305] the amino acid at or corresponding to position 930, is other than glycine;

[0306] the amino acid at or corresponding to position 957 is other than threonine;

[0307] the amino acid at or corresponding to position 982 is other than proline;

[0308] In some embodiments, the mutated CESA enzyme comprising SEQ ID NO: 1, a orthologue, paralogue, or homologue thereof, comprises one or more of the following:

[0309] the amino acid at or corresponding to position 832 is Ala, Arg, Asn, Asp, Cys, Gln, Glu, Gly, His, Ile, Leu, Lys, Met, Phe, Pro, Thr, Trp, Tyr, or Val

[0310] the amino acid at or corresponding to position 840 is Ala, Arg, Asn, Asp, Cys, Gln, Glu, His, Ile, Leu, Lys, Met, Phe, Pro, Ser, Thr, Trp, Tyr, or Val

[0311] the amino acid at or corresponding to position 842 is Ala, Arg, Asn, Asp, Cys, Gln, Glu, Gly, Ile, Leu, Lys, Met, Phe, Pro, Ser, Thr, Trp, Tyr, or Val

[0312] the amino acid at or corresponding to position 843 is Ala, Arg, Asn, Asp, Cys, Gln, Glu, His, Ile, Leu, Lys, Met, Phe, Pro, Ser, Thr, Trp, Tyr, or Val

[0313] the amino acid at or corresponding to position 885 is Ala, Arg, Asn, Asp, Cys, Gln, Glu, Gly, His, Ile, Leu, Lys, Met, Phe, Ser, Thr, Trp, Tyr, or Val

[0314] the amino acid at or corresponding to position 928 is Ala, Arg, Asn, Asp, Cys, Gln, Glu, Gly, His, Ile, Leu, Lys, Met, Phe, Pro, Ser, Thr, Trp, or Tyr,

[0315] the amino acid at or corresponding to position 930, is Ala, Arg, Asn, Asp, Cys, Gln, Glu, His, Ile, Leu, Lys, Met, Phe, Pro, Ser, Thr, Trp, Tyr, or Val

[0316] the amino acid at or corresponding to position 957 is Ala, Arg, Asn, Asp, Cys, Gln, Glu, Gly, His, Ile, Leu, Lys, Met, Phe, Pro, Ser, Trp, Tyr, or Val

[0317] the amino acid at or corresponding to position 982 is Ala, Arg, Asn, Asp, Cys, Gln, Glu, Gly, His, Ile, Leu, Lys, Met, Phe, Ser, Thr, Trp, Tyr, or Val

[0318] In a preferred embodiment, the amino acid at or corresponding to position 832 of SEQ ID NO: 1 is Asn,

[0319] In another preferred embodiment, the amino acid at or corresponding to position 840 of SEQ ID NO: 1 is Asp,

[0320] In another preferred embodiment, the amino acid at or corresponding to position 842 of SEQ ID NO: 1 is Glu,

[0321] In another preferred embodiment, the amino acid at or corresponding to position 843 of SEQ ID NO: 1 is Glu,

[0322] In another preferred embodiment, the amino acid at or corresponding to position 885 of SEQ ID NO: 1 Ser,

[0323] In another preferred embodiment, the amino acid at or corresponding to position 928 of SEQ ID NO: 1 is Ile,

[0324] In another preferred embodiment, he amino acid at or corresponding to position 930 of SEQ ID NO: 1 is Asp,

[0325] In another preferred embodiment, the amino acid at or corresponding to position 957 of SEQ ID NO: 1 is Ile,

[0326] In another preferred embodiment, the amino acid at or corresponding to position 982 of SEQ ID NO: 1 is Ser,

[0327] In another embodiment, the variant or derivative of the CESA polypeptide refers to a CESA polypeptide comprising SEQ ID NO: 51, a orthologue, paralogue, or homologue thereof, wherein the amino acid sequence differs from the wildtype amino acid sequence of a CESA polypeptide at or corresponding to the position 1066 of SEQ ID NO:51.

[0328] Examples of differences at these amino acid positions include, but are not limited to, one or more of the following:

[0329] the amino acid at or corresponding to position 1066 of SEQ ID NO:51 is other than alanine;

[0330] In some embodiments, the mutated CESA enzyme comprising SEQ ID NO:51, a orthologue, paralogue, or homologue thereof, comprises one or more of the following the amino acid at or corresponding to position 1066 is Val, Arg, Asn, Asp, Cys, Gln, Glu, Gly, His, Ile, Leu, Lys, Met, Phe, Pro, Ser, Thr, Trp, or Tyr.

[0331] In a particularly preferred embodiment, the amino acid at or corresponding to position 1066 of SEQ ID NO:51 is Thr.

[0332] In another embodiment, the variant or derivative of the CESA polypeptide refers to a CESA polypeptide comprising SEQ ID NO: 55, a orthologue, paralogue, or homologue thereof, wherein the amino acid sequence differs from the wildtype amino acid sequence of a CESA polypeptide at or corresponding to the position 1022 of SEQ ID NO:55.

[0333] Examples of differences at these amino acid positions include, but are not limited to, one or more of the following:

[0334] the amino acid at or corresponding to position 1022 of SEQ ID NO:55 is other than valine;

[0335] In some embodiments, the mutated CESA enzyme comprising SEQ ID NO:55, a orthologue, paralogue, or homologue thereof, comprises one or more of the following the amino acid at or corresponding to position 1022 is Ala, Arg, Asn, Asp, Cys, Gln, Glu, Gly, His, Ile, Leu, Lys, Met, Phe, Pro, Ser, Thr, Trp, or Tyr.

[0336] In a particularly preferred embodiment, the amino acid at or corresponding to position 1022 of SEQ ID NO:55 is Leu.

[0337] Table 2C provide an overview of positions in the orthologues and homologues to SEQ ID NO:1, i.e. the corresponding positions in SEQ ID NOs: 1 to 83.

| ID | Pos 1 | Pos 2 | Pos 3 | Pos 4 | Pos 5 | Pos 6 | Pos 7 | Pos 8 | Pos 9 | Pos 10 | Pos 11 |
|---|---|---|---|---|---|---|---|---|---|---|---|
| 1 | S832 | G840 | H842 | G843 | P885 | V928 | G930 | T957 | P982 | N1072 | V1021 |
| 2 | S836 | G844 | G846 | G847 | P889 | V932 | G934 | T961 | P985 | G1072 | V1024 |
| 3 | S817 | G825 | N827 | G828 | P870 | V913 | G915 | T942 | P967 | G1055 | V1006 |
| 4 | S800 | A808 | G810 | G811 | P853 | V896 | G898 | T925 | P951 | G1039 | V990 |
| 5 | S822 | G830 | G832 | G833 | P875 | V918 | G920 | T947 | P971 | G1058 | V1010 |
| 6 | S837 | G845 | G847 | G848 | P890 | V933 | G935 | T962 | P986 | G1073 | V1025 |
| 7 | S778 | G786 | G789 | G790 | P832 | V875 | G877 | T904 | P928 | G1016 | V967 |
| 8 | S735 | G743 | G746 | G747 | P789 | V832 | G834 | T861 | P885 | T974 | V924 |
| 9 | S840 | G848 | G850 | G851 | P893 | V936 | G938 | T965 | P989 | G1076 | V1028 |
| 10 | S819 | G827 | N829 | G830 | P872 | V915 | G917 | T944 | P969 | N1060 | V1008 |
| 11 | S825 | G833 | N835 | G836 | P878 | V921 | G923 | T950 | P975 | A1064 | V1014 |
| 12 | S734 | G742 | G745 | G746 | P788 | V831 | G833 | T860 | P884 | T972 | V923 |
| 13 | S825 | G833 | N835 | G836 | P878 | V921 | G923 | T950 | P975 | A1064 | V1014 |
| 14 | S838 | G846 | G848 | G849 | P891 | V934 | G936 | T963 | P987 | G1075 | V1026 |
| 15 | S806 | G814 | N817 | G818 | P860 | V903 | G905 | T932 | P958 | G1046 | V997 |
| 16 | S829 | G837 | G839 | G840 | P882 | V925 | G927 | T954 | P979 | G1067 | V1018 |
| 17 | S846 | G854 | G856 | G857 | P899 | V942 | G944 | T971 | P995 | G1083 | V1034 |
| 18 | S348 | G356 | G358 | G359 | P401 | V444 | G446 | T473 | P498 | G586 | V537 |
| 19 | S835 | G843 | G845 | G846 | P888 | V931 | G933 | T960 | P984 | G1072 | V1023 |
| 20 | S831 | G839 | G841 | G842 | P884 | V927 | G929 | T956 | P981 | G1069 | V1020 |
| 21 | S734 | G742 | G745 | G746 | P788 | V831 | G833 | T860 | P884 | T972 | V923 |
| 22 | — | — | — | — | — | — | — | — | — | — | — |
| 23 | S826 | G834 | N836 | G837 | P879 | V922 | G924 | T951 | P976 | A1065 | V1015 |
| 24 | S828 | G836 | G838 | G839 | P881 | V924 | G926 | T953 | P978 | G1066 | V1017 |
| 25 | S841 | G849 | G851 | G852 | P894 | V937 | G939 | T966 | P990 | G1078 | V1029 |
| 26 | S785 | G793 | E796 | G797 | P839 | V882 | G884 | T911 | P935 | G1023 | V974 |
| 27 | S831 | G839 | G841 | G842 | P884 | V927 | G929 | T956 | P980 | D1067 | V1019 |
| 28 | S831 | G839 | G841 | G842 | P884 | V927 | G929 | T956 | P981 | G1069 | V1020 |
| 29 | S726 | — | G734 | G735 | P777 | V820 | G822 | V851 | P875 | G963 | V914 |
| 30 | S725 | G733 | G736 | G737 | P779 | V822 | G824 | T851 | P875 | A964 | V914 |
| 31 | S791 | G799 | E802 | K803 | P845 | V888 | G890 | T917 | P941 | G1029 | V980 |
| 32 | S720 | G728 | G730 | G731 | P773 | V816 | G818 | A845 | P868 | G956 | V907 |
| 33 | S739 | G747 | G750 | G751 | P793 | V836 | G838 | V868 | P892 | G980 | V931 |
| 34 | S836 | G844 | N846 | G847 | P889 | V932 | G934 | T961 | P986 | K1074 | V1025 |
| 35 | S836 | G844 | N846 | G847 | P889 | V932 | G934 | T961 | P986 | K1074 | V1025 |
| 36 | S726 | G734 | G737 | G738 | P780 | V823 | G825 | T852 | P876 | A965 | V915 |
| 37 | S791 | G799 | E802 | K803 | P845 | V888 | G890 | T917 | P941 | G1029 | V980 |
| 38 | S848 | G856 | G858 | G859 | P901 | V944 | G946 | T973 | P997 | G1084 | V1036 |
| 39 | S739 | G747 | G750 | G751 | P793 | V836 | G838 | T865 | P889 | E978 | V928 |
| 40 | S785 | G793 | E796 | G797 | P839 | V882 | G884 | T911 | P935 | G1023 | V974 |
| 41 | S832 | G840 | G842 | G843 | P885 | V928 | G930 | T957 | P982 | G1070 | V1021 |
| 42 | S726 | G734 | G737 | G738 | P780 | V823 | G825 | — | P858 | E947 | V897 |
| 43 | S848 | G856 | G858 | G859 | P901 | V944 | G946 | T973 | P997 | G1084 | V1036 |
| 44 | S825 | G833 | S835 | G836 | P878 | V921 | G923 | T950 | P975 | G1063 | V1014 |
| 45 | S826 | G834 | S836 | G837 | P879 | V922 | G924 | T951 | P976 | G1064 | V1015 |
| 46 | S848 | G856 | G858 | C859 | P901 | V944 | G946 | T973 | P997 | G1084 | V1036 |
| 47 | S831 | G839 | G841 | G842 | P884 | V927 | G929 | T956 | P980 | D1067 | V1019 |
| 48 | S740 | G748 | G751 | G752 | P794 | V837 | G839 | T866 | P890 | T978 | V929 |
| 49 | S825 | G833 | G835 | G836 | P878 | V921 | G923 | T950 | P975 | G1063 | V1014 |
| 50 | S844 | G852 | G854 | G855 | P897 | V940 | G942 | T969 | P993 | G1081 | V1032 |
| 51 | S827 | G835 | N837 | G838 | P880 | V923 | G925 | T952 | P977 | A1066 | V1016 |
| 52 | S925 | — | S933 | R934 | R976 | L1019 | G1021 | T1048 | P1075 | G1164 | V1114 |
| 53 | S769 | — | S777 | R778 | A820 | V863 | G865 | T892 | P919 | D1002 | V958 |
| 54 | S600 | — | G609 | R610 | P652 | M696 | T698 | E725 | P762 | A852 | V802 |
| 55 | S833 | G841 | G843 | G844 | P886 | V929 | G931 | T958 | P983 | G1071 | V1022 |
| 56 | S844 | G852 | G854 | G855 | P897 | V940 | G942 | T969 | P993 | G1081 | V1032 |
| 57 | S845 | G853 | G855 | G856 | P898 | V941 | G943 | T970 | P994 | G1082 | V1033 |
| 58 | S589 | G597 | G599 | G600 | P642 | V685 | G687 | T714 | P738 | G826 | V777 |
| 59 | S718 | G726 | G728 | G729 | P771 | V814 | G816 | T843 | P867 | G955 | V906 |
| 60 | S899 | — | S907 | R908 | Q950 | — | — | T990 | P1017 | G1105 | V1056 |
| 61 | S805 | G813 | N816 | G817 | P859 | V902 | G904 | T931 | P957 | G1045 | V996 |
| 62 | S814 | A822 | G824 | G825 | P867 | V910 | G912 | T939 | P965 | G1053 | V1004 |
| 63 | S880 | — | S888 | S889 | Q931 | L974 | G976 | T1003 | P1030 | G1121 | V1069 |
| 64 | S958 | — | S966 | P967 | Q1009 | V1052 | G1054 | T1081 | P1118 | E1205 | V1157 |
| 65 | S835 | G843 | G845 | G846 | P888 | V931 | G933 | T960 | P984 | G1071 | V1023 |
| 66 | S818 | G826 | S828 | G829 | P871 | V914 | G916 | T943 | P968 | G1056 | V1007 |
| 67 | S837 | G845 | G847 | G848 | P890 | V933 | G935 | T962 | P986 | G1073 | V1025 |
| 68 | S832 | G840 | G842 | G843 | P885 | V928 | G930 | T957 | P981 | G1068 | V1020 |
| 69 | S834 | G842 | T844 | G845 | P887 | V930 | G932 | T959 | P984 | N1074 | V1023 |
| 70 | S818 | G826 | S828 | G829 | P871 | V914 | G916 | T943 | P968 | G1056 | V1007 |
| 71 | S835 | G843 | G845 | G846 | P888 | V931 | G933 | T960 | P984 | G1071 | V1023 |
| 72 | S832 | G840 | G842 | G843 | P885 | V928 | G930 | T957 | P981 | G1068 | V1020 |
| 73 | S834 | G842 | T844 | G845 | P887 | V930 | G932 | T959 | P984 | N1074 | V1023 |
| 74 | S818 | G826 | S828 | G829 | P871 | V914 | G916 | T943 | P968 | G1056 | V1007 |
| 75 | S831 | G839 | T841 | G842 | P884 | V927 | G929 | T956 | P981 | N1071 | V1020 |
| 76 | S831 | G839 | T841 | G842 | P884 | V927 | G929 | T956 | P981 | N1071 | V1020 |
| 77 | S818 | G826 | S828 | G829 | P871 | V914 | G916 | T943 | P968 | G1056 | V1007 |
| 78 | S837 | G845 | G847 | G848 | P890 | V933 | G935 | T962 | P986 | G1073 | V1025 |
| 79 | S830 | G838 | N840 | G841 | P883 | V926 | G928 | T955 | P980 | D1069 | V1019 |
| 80 | S833 | G841 | S843 | G844 | P886 | V929 | G931 | T958 | P983 | G1071 | V1022 |
| 81 | S792 | G800 | G803 | G804 | P846 | V889 | G891 | T918 | P942 | G1030 | V981 |
| 82 | S673 | G681 | S683 | G684 | P726 | — | — | — | — | — | — |
| 83 | S361 | G369 | G371 | C372 | P414 | V457 | G459 | T486 | — | — | — |

[0338] Another object refers to a method of identifying a nucleotide sequence encoding a mutated CESA which is resistant or tolerant to a CESA-inhibiting herbicide, the method comprising:
[0339] a) generating a library of mutated CESA-encoding nucleic acids,
[0340] b) screening a population of the resulting mutated CESA-encoding nucleic acids by expressing each of said nucleic acids in a cell or plant and treating said cell or plant with a CESA-inhibiting herbicide,
[0341] c) comparing the CESA-inhibiting herbicide-tolerance levels provided by said population of mutated CESA encoding nucleic acids with the CESA-inhibiting herbicide-tolerance level provided by a control CESA-encoding nucleic acid,
[0342] d) selecting at least one mutated CESA-encoding nucleic acid that provides a significantly increased level of tolerance to a CESA-inhibiting herbicide as compared to that provided by the control CESA-encoding nucleic acid.

[0343] In a preferred embodiment, the mutated CESA-encoding nucleic acid selected in step d) provides at least 2-fold as much resistance or tolerance of a cell or plant to a CESA-inhibiting herbicide as compared to that provided by the control CESA-encoding nucleic acid.

[0344] In a further preferred embodiment, the mutated CESA-encoding nucleic acid selected in step d) provides at least 2-fold, at least 5-fold, at least 10-fold, at least 20-fold, at least 50-fold, at least 100-fold, at least 500-fold, as much resistance or tolerance of a cell or plant to a CESA-inhibiting herbicide as compared to that provided by the control CESA-encoding nucleic acid.

[0345] The resistance or tolerance can be determined by generating a transgenic plant or host cell, preferably a plant cell, comprising a nucleic acid sequence of the library of step a) and comparing said transgenic plant with a control plant or host cell, preferably a plant cell.

[0346] Another object refers to a method of identifying a plant or algae containing a nucleic acid comprising a nucleotide sequence encoding a mutated CESA which is resistant or tolerant to a CESA-inhibiting herbicide, the method comprising:
[0347] a) identifying an effective amount of a CESA-inhibiting herbicide in a culture of plant cells or green algae that leads to death of said cells.
[0348] b) treating said plant cells or green algae with a mutagenizing agent,
[0349] c) contacting said mutagenized cells population with an effective amount of CESA-inhibiting herbicide, identified in a),
[0350] d) selecting at least one cell surviving these test conditions,
[0351] e) PCR-amplification and sequencing of CESA genes from cells selected in d) and comparing such sequences to wild-type CESA gene sequences, respectively.

[0352] In a preferred embodiment, said mutagenizing agent is ethylmethanesulfonate (EMS).

[0353] Many methods well known to the skilled artisan are available for obtaining suitable candidate nucleic acids for identifying a nucleotide sequence encoding a mutated CESA from a variety of different potential source organisms including microbes, plants, fungi, algae, mixed cultures etc. as well as environmental sources of DNA such as soil. These methods include inter alia the preparation of cDNA or genomic DNA libraries, the use of suitably degenerate oligonucleotide primers, the use of probes based upon known sequences or complementation assays (for example, for growth upon tyrosine) as well as the use of mutagenesis and shuffling in order to provide recombined or shuffled mutated CESA-encoding sequences.

[0354] Nucleic acids comprising candidate and control CESA encoding sequences can be expressed in yeast, in a bacterial host strain, in an alga or in a higher plant such as tobacco or Arabidopsis and the relative levels of inherent tolerance of the CESA encoding sequences screened according to a visible indicator phenotype of the transformed strain or plant in the presence of different concentrations of the selected CESA-inhibiting herbicide. Dose responses and relative shifts in dose responses associated with these indicator phenotypes (formation of necrosis, growth inhibition, herbicidal effect etc) are conveniently expressed in terms, for example, of GR50 (concentration for 50% reduction of growth) or MIC (minimum inhibitory concentration) values where increases in values correspond to increases in inherent tolerance of the expressed CESA. For example, in a relatively rapid assay system based upon transformation of Arabidopsis as described in the Example section (Example 7), each mutated CESA encoding sequence may be expressed, for example, as a DNA sequence under expression control of a suitable promoter and T1 plants can be selected for differential tolerance to selected CESA-inhibiting herbicides, measured by growth.

[0355] In another embodiment, candidate nucleic acids are transformed into plant material to generate a transgenic plant, regenerated into morphologically normal fertile plants which are then measured for differential tolerance to selected CESA-inhibiting herbicides as described in the Example section hereinafter. Many suitable methods for transformation using suitable selection markers such as kanamycin, binary vectors such as from Agrobacterium and plant regeneration as, for example, from tobacco leaf discs are well known in the art. Optionally, a control population of plants is likewise transformed with a nucleic acid expressing the control CESA. Alternatively, an untransformed dicot plant such as Arabidopsis or Tobacco can be used as a control since this, in any case, expresses its own endogenous CESA. The average, and distribution, of herbicide tolerance levels of a range of primary plant transformation events or their progeny to CESA-inhibiting herbicides described supra are evaluated in the normal manner based upon plant damage, meristematic bleaching symptoms etc. at a range of different concentrations of herbicides. These data can be expressed in terms of, for example, GR50 values derived from dose/response curves having “dose” plotted on the x-axis and “percentage kill”, “herbicidal effect”, “numbers of emerging green plants” etc. plotted on the y-axis where increased GR50 values correspond to increased levels of inherent tolerance of the expressed CESA. Herbicides can suitably be applied pre-emergence or post-emergence.

[0356] Another object of the present invention refers to an isolated and or recombinantly produced and/or synthetic nucleic acid encoding a mutated CESA as disclosed SUPRA, wherein the nucleic acid comprises the nucleotide sequence of SEQ ID NO: 84, 85, 86, 87, 88, 89, 90, 91, 92, 93, 94, 95, 96, 97, or 98, or a variant or derivative thereof.

[0357] In one embodiment, the nucleic acid is identifiable by a method as defined above.

[0358] For the purposes of the invention “recombinant” means with regard for example to a nucleic acid sequence, an expression cassette (=gene construct, nucleic acid construct) or a vector containing the nucleic acid sequence according to the invention or an organism transformed by said nucleic acid sequences, expression cassette or vector according to the invention all those constructions produced by genetic engineering methods in which either

[0359] (a) the nucleic acid sequence comprising the sequence of SEQ ID NO: 84, 85, 86, 87, 88, 89, 90, 91, 92, 93, 94, 95, 96, 97, or 98, or a homolog thereof, or its derivatives or parts thereof; or

[0360] (b) a genetic control sequence functionally linked to the nucleic acid sequence described under (a), for example a 3′- and/or 5′-genetic control sequence such as a promoter or terminator, or

[0361] (c) (a) and (b);

[0362] are not found in their natural, genetic environment or have been modified by genetic engineering methods, wherein the modification may by way of example be a substitution, addition, deletion, inversion or insertion of one or more nucleotide residues.

[0363] “Natural genetic environment” means the natural genomic or chromosomal locus in the organism of origin or inside the host organism or presence in a genomic library. In the case of a genomic library the natural genetic environment of the nucleic acid sequence is preferably retained at least in part. The environment borders the nucleic acid sequence at least on one side and has a sequence length of at least 50 bp, preferably at least 500 bp, particularly preferably at least 1,000 bp, most particularly preferably at least 5,000 bp. A naturally occurring expression cassette—for example the naturally occurring combination of the natural promoter of the nucleic acid sequence according to the invention with the corresponding gene—turns into a transgenic expression cassette when the latter is modified by unnatural, synthetic (“artificial”) methods such as by way of example a mutagenation. Appropriate methods are described by way of example in U.S. Pat. No. 5,565,350 or WO 00/15815

[0364] In a preferred embodiment, the encoded mutated CESA is a variant of SEQ ID NO: 1, which includes one or more of the following:

[0365] the amino acid at or corresponding to position 292 is Ala, Asn, Asp, Cys, Gln, Glu, Gly, His, Ile, Leu, Lys, Met, Phe, Pro, Ser, Thr, Trp, Tyr, or Val;

[0366] the amino acid at or corresponding to position 307 is Ala, Arg, Asn, Asp, Cys, Gln, Glu, Gly, His, Ile, Leu, Lys, Met, Phe, Pro, Thr, Trp, Tyr, or Val;

[0367] the amino acid at or corresponding to position 872 is Ala, Arg, Asn, Asp, Cys, Gln, Glu, Gly, His, Ile, Lys, Met, Phe, Pro, Ser, Thr, Trp, Tyr, or Val;

[0368] the amino acid at or corresponding to position 892 is Ala, Arg, Asn, Asp, Cys, Gln, Glu, Gly, His, Ile, Leu, Lys, Met, Phe, Pro, Thr, Trp, Tyr, or Val;

[0369] the amino acid at or corresponding to position 945 is Ala, Arg, Asn, Asp, Cys, Gln, Glu, Gly, His, Ile, Leu, Met, Phe, Pro, Ser, Thr, Trp, Tyr, or Val;

[0370] the amino acid at or corresponding to position 1008 is Ala, Arg, Asn, Asp, Cys, Gln, Glu, Gly, His, Ile, Leu, Lys, Met, Phe, Pro, Ser, Thr, Tyr, or Val;

[0371] the amino acid at or corresponding to position 1011 is Ala, Arg, Asn, Asp, Cys, Gln, Glu, Gly, His, Ile, Lys, Met, Phe, Pro, Ser, Thr, Trp, Tyr, or Val;

[0372] the amino acid at or corresponding to position 1012 is Ala, Arg, Asn, Asp, Cys, Gln, Glu, Gly, His, Ile, Leu, Lys, Met, Pro, Ser, Thr, Trp, Tyr, or Val;

[0373] the amino acid at or corresponding to position 1014 is Ala, Arg, Asn, Asp, Cys, Gln, Glu, Gly, His, Ile, Leu, Met, Phe, Pro, Ser, Thr, Trp, Tyr, or Val;

[0374] the amino acid at or corresponding to position 1018 is Arg, Asn, Asp, Cys, Gln, Glu, Gly, His, Ile, Leu, Lys, Met, Phe, Pro, Ser, Thr, Trp, Tyr, or Val;

[0375] the amino acid at or corresponding to position 1023 is Arg, Asn, Asp, Cys, Gln, Glu, Gly, His, Ile, Leu, Lys, Met, Phe, Pro, Ser, Thr, Trp, Tyr, or Val.

[0376] In a preferred embodiment, the amino acid at or corresponding to position 292 of SEQ ID NO: 1 is His.

[0377] In another preferred embodiment, the amino acid at or corresponding to position 307 of SEQ ID NO: 1 is Leu,

[0378] In another preferred embodiment, the amino acid at or corresponding to position 872 of SEQ ID NO: 1 is Phe,

[0379] In another preferred embodiment, the amino acid at or corresponding to position 892 of SEQ ID NO: 1 is Asn,

[0380] In another preferred embodiment, the amino acid at or corresponding to position 945 of SEQ ID NO: 1 is Arg,

[0381] In another preferred embodiment, the amino acid at or corresponding to position 1008 of SEQ ID NO: 1 is Phe or Ala

[0382] In another preferred embodiment, the amino acid at or corresponding to position 1011 of SEQ ID NO: 1 is Phe or Ala;

[0383] In another preferred embodiment, the amino acid at or corresponding to position 1012 of SEQ ID NO: 1 is Leu or Tyr;

[0384] In another preferred embodiment, the amino acid at or corresponding to position 1014 of SEQ ID NO: 1 is Arg, or Gln;

[0385] In another preferred embodiment, the amino acid at or corresponding to position 1018 of SEQ ID NO: 1 is Val;

[0386] In another preferred embodiment, the amino acid at or corresponding to position 1023 of SEQ ID NO: 1 is Thr.

[0387] In another preferred embodiment, the encoded mutated CESA is a variant of SEQ ID NO: 1, which includes one or more of the following:

[0388] the amino acid at or corresponding to position 832 is Ala, Arg, Asn, Asp, Cys, Gln, Glu, Gly, His, Ile, Leu, Lys, Met, Phe, Pro, Thr, Trp, Tyr, or Val

[0389] the amino acid at or corresponding to position 840 is Ala, Arg, Asn, Asp, Cys, Gln, Glu, His, Ile, Leu, Lys, Met, Phe, Pro, Ser, Thr, Trp, Tyr, or Val

[0390] the amino acid at or corresponding to position 842 is Ala, Arg, Asn, Asp, Cys, Gln, Glu, Gly, Ile, Leu, Lys, Met, Phe, Pro, Ser, Thr, Trp, Tyr, or Val

[0391] the amino acid at or corresponding to position 843 is Ala, Arg, Asn, Asp, Cys, Gln, Glu, His, Ile, Leu, Lys, Met, Phe, Pro, Ser, Thr, Trp, Tyr, or Val

[0392] the amino acid at or corresponding to position 885 is Ala, Arg, Asn, Asp, Cys, Gln, Glu, Gly, His, Ile, Leu, Lys, Met, Phe, Ser, Thr, Trp, Tyr, or Val

[0393] the amino acid at or corresponding to position 928 is Ala, Arg, Asn, Asp, Cys, Gln, Glu, Gly, His, Ile, Leu, Lys, Met, Phe, Pro, Ser, Thr, Trp, or Tyr,

[0394] the amino acid at or corresponding to position 930, is Ala, Arg, Asn, Asp, Cys, Gln, Glu, His, Ile, Leu, Lys, Met, Phe, Pro, Ser, Thr, Trp, Tyr, or Val

[0395] the amino acid at or corresponding to position 957 is Ala, Arg, Asn, Asp, Cys, Gln, Glu, Gly, His, Ile, Leu, Lys, Met, Phe, Pro, Ser, Trp, Tyr, or Val

[0396] the amino acid at or corresponding to position 982 is Ala, Arg, Asn, Asp, Cys, Gln, Glu, Gly, His, Ile, Leu, Lys, Met, Phe, Ser, Thr, Trp, Tyr, or Val

[0397] In a preferred embodiment, the amino acid at or corresponding to position 832 of SEQ ID NO: 1 is Asn,

[0398] In another preferred embodiment, the amino acid at or corresponding to position 840 of SEQ ID NO: 1 is Asp,

[0399] In another preferred embodiment, the amino acid at or corresponding to position 842 of SEQ ID NO: 1 is Glu,

[0400] In another preferred embodiment, the amino acid at or corresponding to position 843 of SEQ ID NO: 1 is Glu,

[0401] In another preferred embodiment, the amino acid at or corresponding to position 885 of SEQ ID NO: 1 Ser,

[0402] In another preferred embodiment, the amino acid at or corresponding to position 928 of SEQ ID NO: 1 is Ile,

[0403] In another preferred embodiment, he amino acid at or corresponding to position 930 of SEQ ID NO: 1 is Asp,

[0404] In another preferred embodiment, the amino acid at or corresponding to position 957 of SEQ ID NO: 1 is Ile,

[0405] In another preferred embodiment, the amino acid at or corresponding to position 982 of SEQ ID NO: 1 is Ser,

[0406] In another preferred embodiment, the encoded mutated CESA is a variant of SEQ ID NO: 3, which includes one or more of the following:

[0407] the amino acid at or corresponding to position 984 is Ala, Arg, Asn, Asp, Cys, Gln, Glu, Gly, His, Ile, Leu, Lys, Met, Phe, Pro, Ser, Thr, Trp, or Val

[0408] the amino acid at or corresponding to position 1036 is Arg, Asn, Asp, Cys, Gln, Glu, Gly, His, Ile, Leu, Lys, Met, Phe, Pro, Ser, Thr, Trp, Tyr, or Val

[0409] the amino acid at or corresponding to position 1038 is Ala, Arg, Asn, Asp, Cys, Gln, Glu, Gly, His, Leu, Lys, Met, Phe, Pro, Ser, Thr, Trp, Tyr, or Val

[0410] the amino acid at or corresponding to position 1039 is Ala, Arg, Asn, Asp, Cys, Gln, Glu, Gly, His, Ile, Leu, Lys, Met, Pro, Ser, Thr, Trp, Tyr, Val

[0411] the amino acid at or corresponding to position 1041 is Ala, Arg, Asn, Asp, Cys, Gln, Glu, Gly, His, Ile, Lys, Met, Phe, Pro, Ser, Thr, Trp, Tyr, Val

[0412] In a preferred embodiment, the amino acid at or corresponding to position 984 of SEQ ID NO: 3 is Asp,

[0413] In another preferred embodiment, the amino acid at or corresponding to position 1036 of SEQ ID NO: 3 is Leu or Phe

[0414] In another preferred embodiment, the amino acid at or corresponding to position 1038 of SEQ ID NO: 3 is Ala, or Phe,

[0415] In another preferred embodiment, the amino acid at or corresponding to position 1039 of SEQ ID NO: 3 is Leu,

[0416] n another preferred embodiment, the amino acid at or corresponding to position 1041 of SEQ ID NO: 3 is Ala, or Phe,

[0417] In other aspects, the present invention encompasses a progeny or a descendant of a CESA-inhibiting herbicides-tolerant plant of the present invention as well as seeds derived from the CESA-inhibiting herbicides-tolerant plants of the invention and cells derived from the CESA-inhibiting herbicides-tolerant plants of the invention.

[0418] In some embodiments, the present invention provides a progeny or descendant plant derived from a plant comprising in at least some of its cells a polynucleotide operably linked to a promoter operable in plant cells, the promoter capable of expressing a mutated CESA polypeptide encoded by the polynucleotide, wherein the progeny or descendant plant comprises in at least some of its cells the recombinant polynucleotide operably linked to the promoter, the expression of the mutated CESA polypeptide conferring to the progeny or descendant plant tolerance to the CESA-inhibiting herbicides.

[0419] In one embodiment, seeds of the present invention preferably comprise the CESA-inhibiting herbicides-tolerance characteristics of the CESA-inhibiting herbicides-tolerant plant. In other embodiments, a seed is capable of germination into a plant comprising in at least some of its cells a polynucleotide operably linked to a promoter operable in plant cells, the promoter capable of expressing a mutated CESA polypeptide encoded by the polynucleotide, the expression of the mutated CESA polypeptide conferring to the progeny or descendant plant tolerance to the CESA-inhibiting herbicides.

[0420] In some embodiments, plant cells of the present invention are capable of regenerating a plant or plant part. In other embodiments, plant cells are not capable of regenerating a plant or plant part. Examples of cells not capable of regenerating a plant include, but are not limited to, endosperm, seed coat (testa & pericarp), and root cap.

[0421] In another embodiment, the present invention provides a plant cell of or capable of regenerating a plant comprising in at least some of its cells a polynucleotide operably linked to a promoter operable in plant cells, the promoter capable of expressing a mutated CESA polypeptide encoded by the polynucleotide, the expression of the mutated CESA polypeptide conferring to the plant tolerance to the CESA-inhibiting herbicides, wherein the plant cell comprises the recombinant polynucleotide operably linked to a promoter.

[0422] In other embodiments, the present invention provides a plant cell comprising a polynucleotide operably linked to a promoter operable in plant cells, the promoter capable of expressing a mutated CESA polypeptide encoded by the polynucleotide, the expression of the mutated CESA polypeptide conferring to the cell tolerance to the CESA-inhibiting herbicides.

[0423] In another embodiment, the invention refers to a plant cell transformed by a nucleic acid encoding a mutated CESA polypeptide according to the present invention or to a plant cell which has been mutated to obtain a plant expressing a nucleic acid encoding a mutated CESA polypeptide according to the present invention, wherein expression of the nucleic acid in the plant cell results in increased resistance or tolerance to a CESA-inhibiting herbicide as compared to a wild type variety of the plant cell. Preferably, the mutated CESA polypeptide encoding nucleic acid comprises a polynucleotide sequence selected from the group consisting of: a) a polynucleotide as shown in SEQ ID NO: 84, 85, 86, 87, 88, 89, 90, 91, 92, 93, 94, 95, 96, 97, or 98, or a variant or derivative thereof; b) a polynucleotide encoding a polypeptide as shown in SEQ ID NO: 1, 2, 3, 4, 5, 6, 7, 8, 9, 10, 11, 12, 13, 14, 15, 16, 17, 18, 19, 20, 21, 22, 23, 24, 25, 26, 27, 28, 29, 30, 31, 32, 33, 34, 35, 36, 37, 38, 39, 40, 41, 42, 43, 44, 45, 46, 47, 48, 49, 50, 51, 52, 53, 54, 55, 56, 57, 58, 59, 60, 61, 62, 63, 64, 65, 66, 67, 68, 69, 70, 71, 72, 73, 74, 75, 76, 77, 78, 79, 80, 81, 82 or 83, or a variant or derivative thereof; c) a polynucleotide comprising at least 60 consecutive nucleotides of any of a) or b); and d) a polynucleotide complementary to the polynucleotide of any of a) through c).

[0424] In some aspects, the present invention provides a plant product prepared from the CESA-inhibiting herbicides-tolerant plants hereof. In some embodiments, examples of plant products include, without limitation, grain, oil, and meal. In one embodiment, a plant product is plant grain (e.g., grain suitable for use as feed or for processing), plant oil (e.g., oil suitable for use as food or biodiesel), or plant meal (e.g., meal suitable for use as feed).

[0425] In one embodiment, a plant product prepared from a plant or plant part is provided, wherein the plant or plant part comprises in at least some of its cells a polynucleotide operably linked to a promoter operable in plant cells, the promoter capable of expressing a mutated CESA polypeptide encoded by the polynucleotide, the expression of the mutated CESA polypeptide conferring to the plant or plant part tolerance to the CESA-inhibiting herbicides.

[0426] In another embodiment, the invention refers to a method of producing a transgenic plant cell with an increased resistance to a CESA-inhibiting herbicide as compared to a wild type variety of the plant cell comprising, transforming the plant cell with an expression cassette comprising a polynucleotide operably linked to a promoter operable in plant cells, the promoter capable of expressing a mutated CESA polypeptide encoded by the polynucleotide.

[0427] In another embodiment, the invention refers to a method of producing a transgenic plant comprising, (a) transforming a plant cell with an expression cassette comprising a a polynucleotide operably linked to a promoter operable in plant cells, the promoter capable of expressing a mutated CESA polypeptide encoded by the polynucleotide, and (b) generating a plant with an increased resistance to CESA-inhibiting herbicide from the plant cell.

[0428] In some aspects, the present invention provides a method for producing a CESA-inhibiting herbicides-tolerant plant. In one embodiment, the method comprises: regenerating a plant from a plant cell transformed with a polynucleotide operably linked to a promoter operable in plant cells, the promoter capable of expressing a mutated CESA polypeptide encoded by the polynucleotide, the expression of the mutated CESA polypeptide conferring to the plant tolerance to the CESA-inhibiting herbicides.

[0429] The term “expression/expressing” or “gene expression” means the transcription of a specific gene or specific genes or specific genetic construct. The term “expression” or “gene expression” in particular means the transcription of a gene or genes or genetic construct into structural RNA (rRNA, tRNA) or mRNA with or without subsequent translation of the latter into a protein. The process includes transcription of DNA and processing of the resulting mRNA product.

[0430] To obtain the desired effect, i.e. plants that are tolerant or resistant to the CESA-inhibiting herbicide derivative herbicide of the present invention, it will be understood that the at least one nucleic acid is “over-expressed” by methods and means known to the person skilled in the art.

[0431] The term “increased expression” or “overexpression” as used herein means any form of expression that is additional to the original wild-type expression level. Methods for increasing expression of genes or gene products are well documented in the art and include, for example, overexpression driven by appropriate promoters, the use of transcription enhancers or translation enhancers. Isolated nucleic acids which serve as promoter or enhancer elements may be introduced in an appropriate position (typically upstream) of a non-heterologous form of a polynucleotide so as to upregulate expression of a nucleic acid encoding the polypeptide of interest. For example, endogenous promoters may be altered in vivo by mutation, deletion, and/or substitution (see, Kmiec, U.S. Pat. No. 5,565,350; Zarling et al., WO9322443), or isolated promoters may be introduced into a plant cell in the proper orientation and distance from a gene of the present invention so as to control the expression of the gene. If polypeptide expression is desired, it is generally desirable to include a polyadenylation region at the 3′-end of a polynucleotide coding region. The polyadenylation region can be derived from the natural gene, from a variety of other plant genes, or from T-DNA. The 3′ end sequence to be added may be derived from, for example, the nopaline synthase or octopine synthase genes, or alternatively from another plant gene, or less preferably from any other eukaryotic gene. An intron sequence may also be added to the 5′ untranslated region (UTR) or the coding sequence of the partial coding sequence to increase the amount of the mature message that accumulates in the cytosol. Inclusion of a spliceable intron in the transcription unit in both plant and animal expression constructs has been shown to increase gene expression at both the mRNA and protein levels up to 1000-fold (Buchman and Berg (1988) Mol. Cell biol. 8: 4395-4405; Callis et al. (1987) Genes Dev 1:1183-1200). Such intron enhancement of gene expression is typically greatest when placed near the 5′ end of the transcription unit. Use of the maize introns Adh1-S intron 1, 2, and 6, the Bronze-1 intron are known in the art. For general information see: The Maize Handbook, Chapter 116, Freeling and Walbot, Eds., Springer, N.Y. (1994).

[0432] Where appropriate, nucleic acid sequences may be optimized for increased expression in a transformed plant. For example, coding sequences that comprise plant-preferred codons for improved expression in a plant can be provided. See, for example, Campbell and Gowri (1990) Plant Physiol., 92: 1-11 for a discussion of host-preferred codon usage. Methods also are known in the art for preparing plant-preferred genes. See, for example, U.S. Pat. Nos. 5,380,831, and 5,436,391, and Murray et al. (1989) Nucleic Acids Res. 17:477-498, herein incorporated by reference.

[0433] Consequently, mutated CESA nucleic acids of the invention are provided in expression cassettes for expression in the plant of interest. The cassette will include regulatory sequences operably linked to a mutated CESA nucleic acid sequence of the invention. The term “regulatory element” as used herein refers to a polynucleotide that is capable of regulating the transcription of an operably linked polynucleotide. It includes, but not limited to, promoters, enhancers, introns, 5′ UTRs, and 3′ UTRs. By “operably linked” is intended a functional linkage between a promoter and a second sequence, wherein the promoter sequence initiates and mediates transcription of the DNA sequence corresponding to the second sequence. Generally, operably linked means that the nucleic acid sequences being linked are contiguous and, where necessary to join two protein coding regions, contiguous and in the same reading frame. The cassette may additionally contain at least one additional gene to be cotransformed into the organism. Alternatively, the additional gene(s) can be provided on multiple expression cassettes.

[0434] Such an expression cassette is provided with a plurality of restriction sites for insertion of the mutated CESA nucleic acid sequence to be under the transcriptional regulation of the regulatory regions. The expression cassette may additionally contain selectable marker genes. The expression cassette of the present invention will include in the 5′-3′ direction of transcription, a transcriptional and translational initiation region (i.e., a promoter), a mutated CESA encoding nucleic acid sequence of the invention, and a transcriptional and translational termination region (i.e., termination region) functional in plants. The promoter may be native or analogous, or foreign or heterologous, to the plant host and/or to the mutated CESA nucleic acid sequence of the invention. Additionally, the promoter may be the natural sequence or alternatively a synthetic sequence. Where the promoter is “foreign” or “heterologous” to the plant host, it is intended that the promoter is not found in the native plant into which the promoter is introduced. Where the promoter is “foreign” or “heterologous” to the mutated CESA nucleic acid sequence of the invention, it is intended that the promoter is not the native or naturally occurring promoter for the operably linked mutated CESA nucleic acid sequence of the invention. As used herein, a chimeric gene comprises a coding sequence operably linked to a transcription initiation region that is heterologous to the coding sequence. While it may be preferable to express the mutated CESA nucleic acids of the invention using heterologous promoters, the native promoter sequences may be used. Such constructs would change expression levels of the mutated CESA protein in the plant or plant cell. Thus, the phenotype of the plant or plant cell is altered.

[0435] The termination region may be native with the transcriptional initiation region, may be native with the operably linked mutated CESA sequence of interest, may be native with the plant host, or may be derived from another source (i.e., foreign or heterologous to the promoter, the mutated CESA nucleic acid sequence of interest, the plant host, or any combination thereof). Convenient termination regions are available from the Ti-plasmid of A. tumefaciens, such as the octopine synthase and nopaline synthase termination regions. See also Guerineau et al. (1991) Mol. Gen. Genet. 262: 141-144; Proudfoot (1991) Cell 64:671-674; Sanfacon et al. (1991) Genes Dev. 5: 141-149; Mogen et al. (1990) Plant Cell 2: 1261-1272; Munroe et al. (1990) Gene 91: 151-158; Ballast al. (1989) Nucleic Acids Res. 17:7891-7903; and Joshi et al. (1987) Nucleic Acid Res. 15:9627-9639. Where appropriate, the gene(s) may be optimized for increased expression in the transformed plant. That is, the genes can be synthesized using plant-preferred codons for improved expression. See, for example, Campbell and Gown (1990) Plant Physiol. 92: 1-11 for a discussion of host-preferred codon usage. Methods are available in the art for synthesizing plant-preferred genes. See, for example, U.S. Pat. Nos. 5,380,831, and 5,436,391, and Murray et al. (1989) Nucleic Acids Res. 17:477-498, herein incorporated by reference.

[0436] While the polynucleotides of the invention may find use as selectable marker genes for plant transformation, the expression cassettes of the invention can include another selectable marker gene for the selection of transformed cells. Selectable marker genes, including those of the present invention, are utilized for the selection of transformed cells or tissues. Marker genes include, but are not limited to, genes encoding antibiotic resistance, such as those encoding neomycin phosphotransferase II (NEO) and hygromycin phosphotransferase (HPT), as well as genes conferring resistance to herbicidal compounds, such as glufosinate ammonium, bromoxynil, imidazolinones, and 2,4-dichlorophenoxyacetate (2,4-D). See generally, Yarranton (1992) Curr. Opin. Biotech. 3:506-511; Christophers on et al (1992) Proc. Natl. Acad. ScL USA 89:6314-6318; Yao et al. (1992) Cell 71:63-72; Reznikoff (1992) Mol Microbiol 6:2419-2422; Barkley et al (1980) in The Operon, pp. 177-220; Hu et al (1987) Cell 48:555-566; Brown et al (1987) Cell 49:603-612; Figge et al (1988) Cell 52:713-722; Deuschle et al (1989) Proc. Natl Acad. AcL USA 86:5400-5404; Fuerst et al (1989) Proc. Natl Acad. ScL USA 86:2549-2553; Deuschle et al (1990) Science 248:480-483; Gossen (1993) Ph.D. Thesis, University of Heidelberg; Reines et al (1993) Proc. Natl Acad. ScL USA 90: 1917-1921; Labow et al (1990) Mol Cell Biol 10:3343-3356; Zambretti et al (1992) Proc. Natl Acad. ScL USA 89:3952-3956; Bairn et al (1991) Proc. Natl Acad. ScL USA 88:5072-5076; Wyborski et al (1991) Nucleic Acids Res. 19:4647-4653; Hillenand-Wissman (1989) Topics Mol Struc. Biol 10: 143-162; Degenkolb et al (1991) Antimicrob. Agents Chemother. 35: 1591-1595; Kleinschnidt et al (1988) Biochemistry 27: 1094-1104; Bonin (1993) Ph.D. Thesis, University of Heidelberg; Gossen et al (1992) Proc. Natl Acad. ScL USA 89:5547-5551; Oliva et al (1992) Antimicrob. Agents Chemother. 36:913-919; Hlavka et al (1985) Handbook of Experimental Pharmacology, Vol. 78 (Springer-Verlag, Berlin); Gill et al (1988) Nature 334:721-724. Such disclosures are herein incorporated by reference. The above list of selectable marker genes is not meant to be limiting. Any selectable marker gene can be used in the present invention.

[0437] Further, additional sequence modifications are known to enhance gene expression in a cellular host. These include elimination of sequences encoding spurious polyadenylation signals, exon-intron splice site signals, transposon-like repeats, and other such well-characterized sequences that may be deleterious to gene expression. The G-C content of the sequence may be adjusted to levels average for a given cellular host, as calculated by reference to known genes expressed in the host cell. Also, if desired, sequences can be readily modified to avoid predicted hairpin secondary mRNA structures. Nucleotide sequences for enhancing gene expression can also be used in the plant expression vectors. These include, for example, introns of the maize Adh gene Adh1-S intron 1, 2, and 6 (Callis et al. Genes and Development 1: 1183-1200, 1987), and leader sequences, (W-sequence) from the Tobacco Mosaic virus (TMV), Maize Chlorotic Mottle Virus and Alfalfa Mosaic Virus (Gallie et al. Nucleic Acid Res. 15:8693-8711, 1987 and Skuzeski et al. Plant Mol. Biol. 15:65-79, 1990). The first intron from the shrunken-1 locus of maize has been shown to increase expression of genes in chimeric gene constructs. U.S. Pat. Nos. 5,424,412 and 5,593,874 disclose the use of specific introns in gene expression constructs, and Gallie et al. (Plant Physiol. 106:929-939, 1994) also have shown that introns are useful for regulating gene expression on a tissue specific basis. To further enhance or to optimize gene expression, the plant expression vectors of the invention also may contain DNA sequences containing matrix attachment regions (MARs). Plant cells transformed with such modified expression systems, then, may exhibit overexpression or constitutive expression of a nucleotide sequence of the invention.

[0438] The invention further provides an isolated recombinant expression vector comprising the expression cassette containing a mutated CESA nucleic acid nucleic acid as described above, wherein expression of the vector in a host cell results in increased tolerance to a CESA-inhibiting herbicide as compared to a wild type variety of the host cell. As used herein, the term “vector” refers to a nucleic acid molecule capable of transporting another nucleic acid to which it has been linked. One type of vector is a “plasmid,” which refers to a circular double stranded DNA loop into which additional DNA segments can be ligated. Another type of vector is a viral vector, wherein additional DNA segments can be ligated into the viral genome. Certain vectors are capable of autonomous replication in a host cell into which they are introduced (e.g., bacterial vectors having a bacterial origin of replication and episomal mammalian vectors). Other vectors (e.g., non-episomal mammalian vectors) are integrated into the genome of a host cell upon introduction into the host cell, and thereby are replicated along with the host genome. Moreover, certain vectors are capable of directing the expression of genes to which they are operatively linked. Such vectors are referred to herein as “expression vectors.” In general, expression vectors of utility in recombinant DNA techniques are often in the form of plasmids. In the present specification, “plasmid” and “vector” can be used interchangeably as the plasmid is the most commonly used form of vector. However, the invention is intended to include such other forms of expression vectors, such as viral vectors (e.g., replication defective retroviruses, adenoviruses, and adeno-associated viruses), which serve equivalent functions.

[0439] The recombinant expression vectors of the invention comprise a nucleic acid of the invention in a form suitable for expression of the nucleic acid in a host cell, which means that the recombinant expression vectors include one or more regulatory sequences, selected on the basis of the host cells to be used for expression, which is operably linked to the nucleic acid sequence to be expressed. Regulatory sequences include those that direct constitutive expression of a nucleotide sequence in many types of host cells and those that direct expression of the nucleotide sequence only in certain host cells or under certain conditions. It will be appreciated by those skilled in the art that the design of the expression vector can depend on such factors as the choice of the host cell to be transformed, the level of expression of polypeptide desired, etc. The expression vectors of the invention can be introduced into host cells to thereby produce polypeptides or peptides, including fusion polypeptides or peptides, encoded by nucleic acids as described herein (e.g., mutated CESA polypeptides, fusion polypeptides, etc.)

[0440] Expression vectors may additionally contain 5′ leader sequences in the expression construct. Such leader sequences can act to enhance translation. Translation leaders are known in the art and include: picornavirus leaders, for example, EMCV leader (Encephalomyo carditis 5′ noncoding region) (Elroy-Stein et al. (1989) PNAS, 86:6126-6130); potyvirus leaders, for example, TEV leader (Tobacco Etch Virus) (Gallie et al. (1995) Gene 165(2):233-238), MDMV leader (Maize Dwarf Mosaic Virus) (Virology 154:9-20), and human immunoglobulin heavy-chain binding protein (BiP) (Macejak et al. (1991) Nature 353:90-94); untranslated leader from the coat protein mRNA of alfalfa mosaic virus (AMV RNA 4) (Jobling et al. (1987) Nature 325:622-625); tobacco mosaic virus leader (TMV) (Gallie et al. (1989) in Molecular Biology of RNA, ed. Cech (Liss, New York), pp. 237-256); and maize chlorotic mottle virus leader (MCMV) (Lommel et al. (1991) Virology 81:382-385). See also, Della-Cioppa et al. (1987) Plant Physiol. 84:965-968.

[0441] Other methods known to enhance translation also can be utilized, for example, introns, and the like. In preparing an expression vector, the various nucleic acid fragments may be manipulated, so as to provide for the nucleic acid sequences in the proper orientation and, as appropriate, in the proper reading frame. Toward this end, adapters or linkers may be employed to join the nucleic acid fragments or other manipulations may be involved to provide for convenient restriction sites, removal of superfluous nucleic acid, removal of restriction sites, or the like. For this purpose, in vitro mutagenesis, primer repair, restriction, annealing, resubstitutions, e.g., transitions and transversions, may be involved.

[0442] A number of promoters can be used in the practice of the invention. The promoters can be selected based on the desired outcome. The nucleic acids can be combined with constitutive, tissue-preferred, or other promoters for expression in plants.

[0443] Constitutive promoters include, for example, the core promoter of the Rsyn7 promoter and other constitutive promoters disclosed in WO 99/43838 and U.S. Pat. No. 6,072,050; the core CaMV 35S promoter (Odell et al. (1985) Nature 313:810-812); rice actin (McElroy et al. (1990) Plant Cell 2: 163-171); ubiquitin (Christensen et al. (1989) Plant Mol. Biol. 12:619-632 and Christensen et al. (1992) Plant Mol. Biol. 18:675-689); pEMU (Last et al. (1991) Theor. Appl. Genet. 81:581-588); MAS (Velten et al. (1984) EMBO J. 3:2723-2730); ALS promoter (U.S. Pat. No. 5,659,026), and the like. Other constitutive promoters include, for example, U.S. Pat. Nos. 5,608,149; 5,608,144; 5,604,121; 5,569,597; 5,466,785; 5,399,680; 5,268,463; 5,608,142; and 6,177,611.

[0444] Tissue-preferred promoters can be utilized to target enhanced expression within a particular plant tissue. Such tissue-preferred promoters include, but are not limited to, leaf-preferred promoters, root-preferred promoters, seed-preferred promoters, and stem-preferred promoters. Some examples of tissue-preferred promoters are described by, e.g., Yamamoto et al. (1997) Plant J. 12(2):255-265; Kawamata et al. (1997) Plant Cell Physiol. 38(7):792-803; Hansen et al. (1997) Mol. Gen Genet. 254(3):337-343; Russell et al. (1997) Transgenic Res. 6(2): 157-168; Rinehart et al. (1996) Plant Physiol. 1 12(3): 1331-1341; Van Camp et al. (1996) Plant Physiol. 112(2):525-535; Canevascini et al. (1996) Plant Physiol. 1 12(2):513-524; Yamamoto et al. (1994) Plant Cell Physiol. 35(5):773-778; Lam (1994) Results Probl. Cell Differ. 20:181-196; Orozco of al. (1993) Plant Mol Biol. 23(6): 1 129-1138; Matsuoka et al. (1993) Voc Natl. Acad. ScL USA 90(20):9586-9590; and Guevara-Garcia et al. (1993) Plant J 4(3):495-505. Promoters can be modified, if necessary, for weak expression.

[0445] In some embodiments, the nucleic acids of interest can be targeted to the chloroplast for expression. In this manner, where the nucleic acid of interest is not directly inserted into the chloroplast, the expression vector will additionally contain a chloroplast-targeting sequence comprising a nucleotide sequence that encodes a chloroplast transit peptide to direct the gene product of interest to the chloroplasts. Such transit peptides are known in the art. With respect to chloroplast-targeting sequences, “operably linked” means that the nucleic acid sequence encoding a transit peptide (i.e., the chloroplast-targeting sequence) is linked to the desired coding sequence of the invention such that the two sequences are contiguous and in the same reading frame. See, for example, Von Heijne et al. (1991) Plant Mol. Biol. Rep. 9: 104-126; Clark et al. (1989) J Biol. Chem. 264:17544-17550; Della-Cioppa et al. (1987) Plant Physiol. 84:965-968; Romer et al. (1993) Biochem. Biophys. Res. Commun. 196: 1414-1421; and Shah et al. (1986) Science 233:478-481. For example, a chloroplast transit peptide known in the art can be fused to the amino acid sequence of a CESA polypeptide of the invention by operably linking a chloroplast-targeting sequence to the 5′-end of a nucleotide sequence encoding the CESA polypeptide.

[0446] Chloroplast targeting sequences are known in the art and include the chloroplast small subunit of ribulose-1,5-bisphosphate carboxylase (Rubisco) (de Castro Silva Filho et al. (1996) Plant Mol. Biol. 30:769-780; Schnell et al. (1991) J Biol. Chem. 266(5):3335-3342); EPSPS (Archer et al. (1990) J Bioenerg. Biomemb. 22(6):789-810); tryptophan synthase (Zhao et al. (1995) J Biol. Chem. 270(11):6081-6087); plastocyanin (Lawrence et al. (1997) J Biol. Chem. 272(33):20357-20363); chorismate synthase (Schmidt et al. (1993) J Biol. Chem. 268(36):27447-27457); and the light harvesting chlorophyll a/b binding protein (LHBP) (Lamppa et al. (1988) J Biol. Chem. 263: 14996-14999). See also Von Heijne et al. (1991) Plant Mol. Biol. Rep. 9: 104-126; Clark et al. (1989) J Biol. Chem. 264: 17544-17550; Della-Cioppa et al. (1987) Plant Physiol. 84:965-968; Romer et al. (1993) Biochem Biophys. Res. Commun. 196: 1414-1421; and Shah et al. (1986) Science 233:478-481.

[0447] Methods for transformation of chloroplasts are known in the art. See, for example, Svab et al. (1990) Proc. Natl. Acad. ScL USA 87:8526-8530; Svab and Maliga (1993) Proc. Natl. Acad. Sci. USA 90:913-917; Svab and Maliga (1993) EMBO J. 12:601-606. The method relies on particle gun delivery of DNA containing a selectable marker and targeting of the DNA to the plastid genome through homologous recombination. Additionally, plastid transformation can be accomplished by transactivation of a silent plastid-borne transgene by tissue-preferred expression of a nuclear-encoded and plastid-directed RNA polymerase. Such a system has been reported in McBride et al. (1994) Proc. Natl. Acad. Sci. USA 91:7301-7305.

[0448] The nucleic acids of interest to be targeted to the chloroplast may be optimized for expression in the chloroplast to account for differences in codon usage between the plant nucleus and this organelle. In this manner, the nucleic acids of interest may be synthesized using chloroplast-preferred codons. See, for example, U.S. Pat. No. 5,380,831, herein incorporated by reference.

[0449] Numerous plant transformation vectors and methods for transforming plants are available. See, for example, An, G. et al. (1986) Plant PysioL, 81:301-305; Fry, J., et al. (1987) Plant Cell Rep. 6:321-325; Block, M. (1988) Theor. Appl. Genet 0.16: 161-1 1 A; Hinchee, et al. (1990) Stadler. Genet. Symp.2032\2.203-2\2; Cousins, et al. (1991) Aust. J. Plant Physiol. 18:481-494; Chee, P. P. and Slightom, J. L. (1992) Gene. I I 8:255-260; Christou, et al. (1992) Trends. Biotechnol. 10:239-246; Halluin, et al. (1992) Bio/Technol. 10:309-314; Dhir, et al. (1992) Plant Physiol. 99:81-88; Casas et al. (1993) Proc. Nat. Acad Sd. USA 90: 1 1212-1 1216; Christou, P. (1993) In Vitro Cell. Dev. Biol.-Plant; 29P.119-124; Davies, et al. (1993) Plant Cell Rep. 12: 180-183; Dong, J. A. and Mchughen, A. (1993) Plant ScL 91: 139-148; Franklin, C. I. and Trieu, T. N. (1993) Plant. Physiol. 102: 167; Golovkin, et al. (1993) Plant ScL 90:41-52; Guo Chin ScL Bull. 38:2072-2078; Asano, et al. (1994) Plant Cell Rep. 13; Ayeres N. M. and Park, W. D. (1994) Crit. Rev. Plant. Sci. 13:219-239; Barcelo, et al. (1994) Plant. J. 5:583-592; Becker, et al. (1994) Plant. J. 5:299-307; Borkowska et al. (1994) Acta. Physiol Plant. 16:225-230; Christou, P. (1994) Agro. Food. Ind. Hi Tech. 5: 17-27; Eapen et al. (1994) Plant Cell Rep. 13:582-586; Hartman, et al. (1994) Bio-Technology 12: 919923; Ritala, et al. (1994) Plant. Mol. Biol. 24:317-325; and Wan, Y. C. and Lemaux, P. G. (1994) Plant Physiol. 104:3748.

[0450] In some embodiments, the methods of the invention involve introducing a polynucleotide construct into a plant. By “introducing” is intended presenting to the plant the polynucleotide construct in such a manner that the construct gains access to the interior of a cell of the plant. The methods of the invention do not depend on a particular method for introducing a polynucleotide construct to a plant, only that the polynucleotide construct gains access to the interior of at least one cell of the plant. Methods for introducing polynucleotide constructs into plants are known in the art including, but not limited to, stable transformation methods, transient transformation methods, and virus-mediated methods. The term “introduction” or “transformation” as referred to herein further means the transfer of an exogenous polynucleotide into a host cell, irrespective of the method used for transfer. Plant tissue capable of subsequent clonal propagation, whether by organogenesis or embryogenesis, may be transformed with a genetic construct of the present invention and a whole plant regenerated there from. The particular tissue chosen will vary depending on the clonal propagation systems available for, and best suited to, the particular species being transformed. Exemplary tissue targets include leaf disks, pollen, embryos, cotyledons, hypocotyls, megagametophytes, callus tissue, existing meristematic tissue (e.g., apical meristem, axillary buds, and root meristems), and induced meristem tissue (e.g., cotyledon meristem and hypocotyl meristem). The polynucleotide may be transiently or stably introduced into a host cell and may be maintained non-integrated, for example, as a plasmid. Alternatively, it may be integrated into the host genome. The resulting transformed plant cell may then be used to regenerate a transformed plant in a manner known to persons skilled in the art.

[0451] By “stable transformation” is intended that the polynucleotide construct introduced into a plant integrates into the genome of the plant and is capable of being inherited by descendent thereof. By “transient transformation” is intended that a polynucleotide construct introduced into a plant does not integrate into the genome of the plant.

[0452] For the transformation of plants and plant cells, the nucleotide sequences of the invention are inserted using standard techniques into any vector known in the art that is suitable for expression of the nucleotide sequences in a plant or plant cell. The selection of the vector depends on the preferred transformation technique and the target plant species to be transformed. In an embodiment of the invention, the encoding nucleotide sequence is operably linked to a plant promoter, e.g. a promoter known in the art for high-level expression in a plant cell, and this construct is then introduced into a plant cell that is susceptible to CESA-inhibiting herbicides; and a transformed plant is regenerated. In some embodiments, the transformed plant is tolerant to exposure to a level of CESA-inhibiting herbicides that would kill or significantly injure a plant regenerated from an untransformed cell. This method can be applied to any plant species or crops.

[0453] Methodologies for constructing plant expression vectors and introducing foreign nucleic acids into plants are generally known in the art. For example, foreign DNA can be introduced into plants, using tumor-inducing (Ti) plasmid vectors. Other methods utilized for foreign DNA delivery involve the use of PEG mediated protoplast transformation, electroporation, microinjection whiskers, and biolistics or microprojectile bombardment for direct DNA uptake. Such methods are known in the art. (U.S. Pat. No. 5,405,765 to Vasil et al.; Bilang et al. (1991) Gene 100: 247-250; Scheid et al., (1991) MoL Gen. Genet., 228: 104-1 12; Guerche et al., (1987) Plant Science 52: 1 1 1-1 16; Neuhause et al., (1987) Theor. Appl Genet. 75: 30-36; Klein et al., (1987) Nature 327: 70-73; Howell et al., (1980) Science 208: 1265; Horsch et al., (1985) Science 227: 1229-1231; DeBlock et al., (1989) Plant Physiology 91: 694-701; Methods for Plant Molecular Biology (Weissbach and Weissbach, eds.) Academic Press, Inc. (1988) and Methods in Plant Molecular Biology (Schuler and Zielinski, eds.) Academic Press, Inc. (1989).

[0454] Other suitable methods of introducing nucleotide sequences into plant cells include microinjection as described by e.g., Crossway et al. (1986) Biotechniques 4:320-334, electroporation as described by e.g., Riggs et al. (1986) Proc. Natl. Acad. ScL USA 83:5602-5606, Agrobacterium-mediated transformation as described by e.g., Townsend et al., U.S. Pat. No. 5,563,055, Zhao et al., U.S. Pat. No. 5,981,840, direct gene transfer as described by, e.g., Paszkowski et al. (1984) EMBO J. 3:2717-2722, and ballistic particle acceleration as described by, e.g., U.S. Pat. Nos. 4,945,050; 5,879,918; 5,886,244; and U.S. Pat. No. 5,932,782; Tomes et al. (1995) “Direct DNA Transfer into Intact Plant Cells via Microprojectile Bombardment,” in Plant Cell, Tissue, and Organ Culture: Fundamental Methods, ed. Gamborg and Phillips (Springer-Verlag, Berlin); McCabe et al. (1988) Biotechnology 6:923-926); and Led transformation (WO 00/28058). Also see, Weissinger et al., (1988) Ann. Rev. Genet. 22:421-477; Sanford et al, (1987) Particulate Science and Technology 5:27-37 (onion); Christou et al, (1988) Plant Physiol. 87:671-674 (soybean); McCabe et al., (1988) Bio/Technology 6:923-926 (soybean); Finer and McMullen (1991) In Vitro Cell Dev. Biol. 27P: 175-182 (soybean); Singh et al, (1998) Theor. Appl. Genet. 96:319-324 (soybean); Datta et al., (1990) Biotechnology 8:736-740 (rice); Klein et al., (1988) PNAS, 85:4305-4309 (maize); Klein et al., (1988) Biotechnology 6:559-563 (maize); U.S. Pat. Nos. 5,240,855; 5,322,783; and U.S. Pat. No. 5,324,646; Tomes et al., (1995) “Direct DNA Transfer into Intact Plant Cells via Microprojectile Bombardment,” in Plant Cell, Tissue, and Organ Culture: Fundamental Methods, ed. Gamborg (Springer-Verlag, Berlin) (maize); Klein et al., (1988) Plant Physiol. 91:440-444 (maize); Fromm et al., (1990) Biotechnology 8:833-839 (maize); Hooykaas-Van Slogteren et al., (1984) Nature (London) 31 1:763-764; Bowen et al, U.S. Pat. No. 5,736,369 (cereals); Bytebier et al, (1987) PNAS 84:5345-5349 (Liliaceae); De Wet et al., (1985) in The Experimental Manipulation of Ovule Tissues, ed. Chapman et al, (Longman, N.Y.), pp. 197-209 (pollen); Kaeppler et al., (1990) Plant Cell Reports 9:415-418 and Kaeppler et al., (1992) Theor. Apph Genet. 84:560-566 (whisker-mediated transformation); D'Halluin et al., (1992) Plant Cell 4: 1495-1505 (electroporation); Li et al., (1993) Plant Cell Reports 12:250-255 and Christou and Ford (1995) Annals of Botany 75:407-413 (rice); Osjoda et al, (1996) Nature Biotechnology 14:745-750 (maize via Agrobacterium tumefaciens); each of which is herein incorporated by reference.

[0455] Transgenic plants, including transgenic crop plants, are preferably produced via Agrobacterium-mediated transformation. An advantageous transformation method is the transformation in planta. To this end, it is possible, for example, to allow the agrobacteria to act on plant seeds or to inoculate the plant meristem with agrobacteria. It has proved particularly expedient in accordance with the invention to allow a suspension of transformed agrobacteria to act on the intact plant or at least on the flower primordia. The plant is subsequently grown on until the seeds of the treated plant are obtained (Clough and Bent, Plant J. (1998) 16, 735-743). Methods for Agrobacterium-mediated transformation of rice include well known methods for rice transformation, such as those described in any of the following: European patent application EP 1198985 A1, Aldemita and Hodges (Planta 199: 612-617, 1996); Chan et al. (Plant Mol Biol 22 (3): 491-506, 1993), Hiei et al. (Plant J 6 (2): 271-282, 1994), which disclosures are incorporated by reference herein as if fully set forth. In the case of corn transformation, the preferred method is as described in either Ishida et al. (Nat. Biotechnol 14(6): 745-50, 1996) or Frame et al. (Plant Physiol 129(1): 13-22, 2002), which disclosures are incorporated by reference herein as if fully set forth. Said methods are further described by way of example in B. Jenes et al., Techniques for Gene Transfer, in: Transgenic Plants, Vol. 1, Engineering and Utilization, eds. S. D. Kung and R. Wu, Academic Press (1993) 128-143 and in Potrykus Annu. Rev. Plant Physiol. Plant Molec. Biol. 42 (1991) 205-225). The nucleic acids or the construct to be expressed is preferably cloned into a vector, which is suitable for transforming Agrobacterium tumefaciens, for example pBin19 (Bevan et al., Nucl. Acids Res. 12 (1984) 8711). Agrobacteria transformed by such a vector can then be used in known manner for the transformation of plants, such as plants used as a model, like Arabidopsis (Arabidopsis thaliana is within the scope of the present invention not considered as a crop plant), or crop plants such as, by way of example, tobacco plants, for example by immersing bruised leaves or chopped leaves in an agrobacterial solution and then culturing them in suitable media. The transformation of plants by means of Agrobacterium tumefaciens is described, for example, by Höfgen and Willmitzer in Nucl. Acid Res. (1988) 16, 9877 or is known inter alia from F. F. White, Vectors for Gene Transfer in Higher Plants; in Transgenic Plants, Vol. 1, Engineering and Utilization, eds. S. D. Kung and R. Wu, Academic Press, 1993, pp. 15-38.

[0456] One transformation method known to those of skill in the art is the dipping of a flowering plant into an Agrobacteria solution, wherein the Agrobacteria contains the CESA nucleic acid, followed by breeding of the transformed gametes. Agrobacterium mediated plant transformation can be performed using for example the GV3101(pMP90) (Koncz and Schell, 1986, Mol. Gen. Genet. 204:383-396) or LBA4404 (Clontech) Agrobacterium tumefaciens strain. Transformation can be performed by standard transformation and regeneration techniques (Deblaere et al., 1994, Nucl. Acids. Res. 13:4777-4788; Gelvin, Stanton B. and Schilperoort, Robert A, Plant Molecular Biology Manual, 2nd Ed.—Dordrecht: Kluwer Academic Publ., 1995.—in Sect., Ringbuc Zentrale Signatur: BT11-P ISBN 0-7923-2731-4; Glick, Bernard R. and Thompson, John E., Methods in Plant Molecular Biology and Biotechnology, Boca Raton: CRC Press, 1993 360 S., ISBN 0-8493-5164-2). For example, rapeseed can be transformed via cotyledon or hypocotyl transformation (Moloney et al., 1989, Plant Cell Report 8:238-242; De Block et al., 1989, Plant Physiol. 91:694-701). Use of antibiotics for Agrobacterium and plant selection depends on the binary vector and the Agrobacterium strain used for transformation. Rapeseed selection is normally performed using kanamycin as selectable plant marker. Agrobacterium mediated gene transfer to flax can be performed using, for example, a technique described by Mlynarova et al., 1994, Plant Cell Report 13:282-285. Additionally, transformation of soybean can be performed using for example a technique described in European Patent No. 0424 047, U.S. Pat. No. 5,322,783, European Patent No. 0397 687, U.S. Pat. No. 5,376,543, or U.S. Pat. No. 5,169,770. Transformation of maize can be achieved by particle bombardment, polyethylene glycol mediated DNA uptake, or via the silicon carbide fiber technique. (See, for example, Freeling and Walbot “The maize handbook” Springer Verlag: New York (1993) ISBN 3-540-97826-7). A specific example of maize transformation is found in U.S. Pat. No. 5,990,387, and a specific example of wheat transformation can be found in PCT Application No. WO 93/07256.

[0457] In some embodiments, polynucleotides of the present invention may be introduced into plants by contacting plants with a virus or viral nucleic acids. Generally, such methods involve incorporating a polynucleotide construct of the invention within a viral DNA or RNA molecule. It is recognized that the polypeptides of the invention may be initially synthesized as part of a viral polyprotein, which later may be processed by proteolysis in vivo or in vitro to produce the desired recombinant polypeptide. Further, it is recognized that promoters of the invention also encompass promoters utilized for transcription by viral RNA polymerases. Methods for introducing polynucleotide constructs into plants and expressing a protein encoded therein, involving viral DNA or RNA molecules, are known in the art. See, for example, U.S. Pat. Nos. 5,889,191, 5,889,190, 5,866,785, 5,589,367 and 5,316,931; herein incorporated by reference. The cells that have been transformed may be grown into plants in accordance with conventional ways. See, for example, McCormick et al. (1986) Plant Cell Reports 5:81-84. These plants may then be grown, and either pollinated with the same transformed strain or different strains, and the resulting hybrid having constitutive expression of the desired phenotypic characteristic identified. Two or more generations may be grown to ensure that expression of the desired phenotypic characteristic is stably maintained and inherited and then seeds harvested to ensure expression of the desired phenotypic characteristic has been achieved.

[0458] The present invention may be used for transformation of any plant species, including, but not limited to, monocots and dicots. Examples of plant species of interest include, but are not limited to, corn or maize (Zea mays), Brassica sp. (e.g., B. napus, B. rapa, B. juncea), particularly those Brassica species useful as sources of seed oil, alfalfa (Medicago sativa), rice (Oryza sativa), rye (Secale cereale), sorghum (Sorghum bicolor, Sorghum vulgare), millet e.g., pearl millet (Pennisetum glaucum), proso millet (Panicum miliaceum), foxtail millet (Setaria italica), finger millet (Eleusine coracana)), sunflower (Helianthus annu), saffiower (Carthamus tinctorius), wheat (Triticum aestivum, T. Turgidum ssp. durum), soybean (Glycine max), tobacco (Nicotiana tabacum), potato (Solarium tuberosum), peanuts (Arachis hypogaea), cotton (Gossypium barbadense, Gossypium hirsutum), sweet potato (Ipomoea batatus), cassava (Manihot esculenta), coffee (Coffea spp.), coconut (Cocos nucifera), pineapple (Ananas comosus), citrus trees (Citrus spp.), cocoa (Theobroma cacao), tea (Camellia sinensis), banana (Musa spp.), avocado (Persea americana), fig (Ficus casica), guava (Psidium guajava), mango (Mangifera indica), olive (Olea europaea), papaya (Carica papaya), cashew (Anacardium occidentale), macadamia (Macadamia integrifolia), almond (Prunus amygdalus), sugar beets (Beta vulgaris), sugarcane (Saccharum spp.), oats, barley, vegetables, ornamentals, and conifers. Preferably, plants of the present invention are crop plants (for example, sunflower, Brassica sp., cotton, sugar, beet, soybean, peanut, alfalfa, safflower, tobacco, corn, rice, wheat, rye, barley triticale, sorghum, millet, etc.).

[0459] In addition to the transformation of somatic cells, which then have to be regenerated into intact plants, it is also possible to transform the cells of plant meristems and in particular those cells which develop into gametes. In this case, the transformed gametes follow the natural plant development, giving rise to transgenic plants. Thus, for example, seeds of Arabidopsis are treated with agrobacteria and seeds are obtained from the developing plants of which a certain proportion is transformed and thus transgenic [Feldman, K A and Marks M D (1987). Mol Gen Genet 208:274-289; Feldmann K (1992). In: C Koncz, N-H Chua and J Shell, Eds, Methods in Arabidopsis Research. Word Scientific, Singapore, pp. 274-289]. Alternative methods are based on the repeated removal of the inflorescences and incubation of the excision site in the center of the rosette with transformed agrobacteria, whereby transformed seeds can likewise be obtained at a later point in time (Chang (1994). Plant J. 5: 551-558; Katavic (1994). Mol Gen Genet, 245: 363-370). However, an especially effective method is the vacuum infiltration method with its modifications such as the “floral dip” method. In the case of vacuum infiltration of Arabidopsis, intact plants under reduced pressure are treated with an agrobacterial suspension [Bechthold, N (1993). C R Acad Sci Paris Life Sci, 316: 1194-1199], while in the case of the “floral dip” method the developing floral tissue is incubated briefly with a surfactant-treated agrobacterial suspension [Clough, S J and Bent A F (1998) The Plant J. 16, 735-743]. A certain proportion of transgenic seeds are harvested in both cases, and these seeds can be distinguished from non-transgenic seeds by growing under the above-described selective conditions. In addition the stable transformation of plastids is of advantages because plastids are inherited maternally is most crops reducing or eliminating the risk of transgene flow through pollen. The transformation of the chloroplast genome is generally achieved by a process which has been schematically displayed in Klaus et al., 2004 [Nature Biotechnology 22 (2), 225-229]. Briefly the sequences to be transformed are cloned together with a selectable marker gene between flanking sequences homologous to the chloroplast genome. These homologous flanking sequences direct site specific integration into the plastome. Plastidal transformation has been described for many different plant species and an overview is given in Bock (2001) Transgenic plastids in basic research and plant biotechnology. J Mol Biol. 2001 Sep. 21; 312 (3):425-38 or Maliga, P (2003) Progress towards commercialization of plastid transformation technology. Trends Biotechnol. 21, 20-28. Further biotechnological progress has recently been reported in form of marker free plastid transformants, which can be produced by a transient co-integrated maker gene (Klaus et al., 2004, Nature Biotechnology 22(2), 225-229). The genetically modified plant cells can be regenerated via all methods with which the skilled worker is familiar. Suitable methods can be found in the abovementioned publications by S. D. Kung and R. Wu, Potrykus or Hofgen and Willmitzer.

[0460] Generally after transformation, plant cells or cell groupings are selected for the presence of one or more markers which are encoded by plant-expressible genes co-transferred with the gene of interest, following which the transformed material is regenerated into a whole plant. To select transformed plants, the plant material obtained in the transformation is, as a rule, subjected to selective conditions so that transformed plants can be distinguished from untransformed plants. For example, the seeds obtained in the above-described manner can be planted and, after an initial growing period, subjected to a suitable selection by spraying. A further possibility consists in growing the seeds, if appropriate after sterilization, on agar plates using a suitable selection agent so that only the transformed seeds can grow into plants. Alternatively, the transformed plants are screened for the presence of a selectable marker such as the ones described above.

[0461] Following DNA transfer and regeneration, putatively transformed plants may also be evaluated, for instance using Southern analysis, for the presence of the gene of interest, copy number and/or genomic organisation. Alternatively or additionally, expression levels of the newly introduced DNA may be monitored using Northern and/or Western analysis, both techniques being well known to persons having ordinary skill in the art.

[0462] The generated transformed plants may be propagated by a variety of means, such as by clonal propagation or classical breeding techniques. For example, a first generation (or T1) transformed plant may be selfed and homozygous second-generation (or T2) transformants selected, and the T2 plants may then further be propagated through classical breeding techniques. The generated transformed organisms may take a variety of forms. For example, they may be chimeras of transformed cells and non-transformed cells; clonal transformants (e.g., all cells transformed to contain the expression cassette); grafts of transformed and untransformed tissues (e.g., in plants, a transformed rootstock grafted to an untransformed scion).

[0463] Preferably, the expression of the nucleic acid in the plant results in the plant's increased tolerance to CESA-inhibiting herbicide as compared to a wild type variety of the plant.

[0464] In another embodiment, the invention refers to a plant, comprising a plant cell according to the present invention, wherein expression of the nucleic acid in the plant results in the plant's increased resistance to CESA-inhibiting herbicide as compared to a wild type variety of the plant.

[0465] The plants described herein can be either transgenic crop plants or non-transgenic plants.

[0466] In addition to the general definition, give SUPRA, “transgenic”, “transgene” or “recombinant” means with regard to, for example, a nucleic acid sequence, an expression cassette, gene construct or a vector comprising the nucleic acid sequence or an organism transformed with the nucleic acid sequences, expression cassettes or vectors according to the invention, all those constructions brought about by recombinant methods in which either
[0467] (a) the nucleic acid sequences encoding proteins useful in the methods of the invention, or
[0468] (b) genetic control sequence(s) which is operably linked with the nucleic acid sequence according to the invention, for example a promoter, or
[0469] (c) a) and b)

[0470] are not located in their natural genetic environment or have been modified by recombinant methods, it being possible for the modification to take the form of, for example, a substitution, addition, deletion, inversion or insertion of one or more nucleotide residues in order to allow for the expression of the mutated CESA of the present invention. The natural genetic environment is understood as meaning the natural genomic or chromosomal locus in the original plant or the presence in a genomic library. In the case of a genomic library, the natural genetic environment of the nucleic acid sequence is preferably retained, at least in part. The environment flanks the nucleic acid sequence at least on one side and has a sequence length of at least 50 bp, preferably at least 500 bp, especially preferably at least 1000 bp, most preferably at least 5000 bp. A naturally occurring expression cassette—for example the naturally occurring combination of the natural promoter of the nucleic acid sequences with the corresponding nucleic acid sequence encoding a polypeptide useful in the methods of the present invention, as defined above—becomes a transgenic expression cassette when this expression cassette is modified by non-natural, synthetic (“artificial”) methods such as, for example, mutagenic treatment. Suitable methods are described, for example, in U.S. Pat. No. 5,565,350 or WO 00/15815.

[0471] A transgenic plant for the purposes of the invention is thus understood as meaning, as above, that the nucleic acids of the invention are not at their natural locus in the genome of said plant, it being possible for the nucleic acids to be expressed homologously or heterologously. However, as mentioned, transgenic also means that, while the nucleic acids according to the invention or used in the inventive method are at their natural position in the genome of a plant, the sequence has been modified with regard to the natural sequence, and/or that the regulatory sequences of the natural sequences have been modified. Transgenic is preferably understood as meaning the expression of the nucleic acids according to the invention at an unnatural locus in the genome, i.e. homologous or, preferably, heterologous expression of the nucleic acids takes place. Preferred transgenic plants are mentioned herein. Furthermore, the term “transgenic” refers to any plant, plant cell, callus, plant tissue, or plant part, that contains all or part of at least one recombinant polynucleotide. In many cases, all or part of the recombinant polynucleotide is stably integrated into a chromosome or stable extra-chromosomal element, so that it is passed on to successive generations. For the purposes of the invention, the term “recombinant polynucleotide” refers to a polynucleotide that has been altered, rearranged, or modified by genetic engineering. Examples include any cloned polynucleotide, or polynucleotides, that are linked or joined to heterologous sequences. The term “recombinant” does not refer to alterations of polynucleotides that result from naturally occurring events, such as spontaneous mutations, or from non-spontaneous mutagenesis followed by selective breeding.

[0472] Plants containing mutations arising due to non-spontaneous mutagenesis and selective breeding are referred to herein as non-transgenic plants and are included in the present invention. In embodiments wherein the plant is transgenic and comprises multiple mutated CESA nucleic acids, the nucleic acids can be derived from different genomes or from the same genome. Alternatively, in embodiments wherein the plant is non-transgenic and comprises multiple mutated CESA nucleic acids, the nucleic acids are located on different genomes or on the same genome.

[0473] In certain embodiments, the present invention involves herbidicide-resistant plants that are produced by mutation breeding. Such plants comprise a polynucleotide encoding a mutated CESA and are tolerant to one or more CESA-inhibiting herbicides. Such methods can involve, for example, exposing the plants or seeds to a mutagen, particularly a chemical mutagen such as, for example, ethyl methanesulfonate (EMS) and selecting for plants that have enhanced tolerance to at least one or more CESA-inhibiting herbicide [see Example 1].

[0474] However, the present invention is not limited to herbicide-tolerant plants that are produced by a mutagenesis method involving the chemical mutagen EMS. Any mutagenesis method known in the art may be used to produce the herbicide-resistant plants of the present invention. Such mutagenesis methods can involve, for example, the use of any one or more of the following mutagens: radiation, such as X-rays, Gamma rays (e.g., cobalt 60 or cesium 137), neutrons, (e.g., product of nuclear fission by uranium 235 in an atomic reactor), Beta radiation (e.g., emitted from radioisotopes such as phosphorus 32 or carbon 14), and ultraviolet radiation (preferably from 250 to 290 nm), and chemical mutagens such as base analogues (e.g., 5-bromo-uracil), related compounds (e.g., 8-ethoxy caffeine), antibiotics (e.g., streptonigrin), alkylating agents (e.g., sulfur mustards, nitrogen mustards, epoxides, ethylenamines, sulfates, sulfonates, sulfones, lactones), azide, hydroxylamine, nitrous acid, or acridines. Herbicide-resistant plants can also be produced by using tissue culture methods to select for plant cells comprising herbicide-resistance mutations and then regenerating herbicide-resistant plants therefrom. See, for example, U.S. Pat. Nos. 5,773,702 and 5,859,348, both of which are herein incorporated in their entirety by reference. Further details of mutation breeding can be found in “Principals of Cultivar Development” Fehr, 1993 Macmillan Publishing Company the disclosure of which is incorporated herein by reference

[0475] Alternatively, herbicide-resistant plants according to the present invention can also be produced by using genome editing methods to select for plant cells comprising herbicide-resistance mutations and then regenerating herbicide-resistant plants therefrom. “Genome Editing” refers to a type of genetic engineering in which DNA is inserted, deleted or replaced in the genome of an organism using engineered nucleases. These nucleases are known to the skilled artisan to create site-specific double-strand breaks at desired locations in the genome. The induced double-strand breaks are repaired through nonhomologous end-joining or homologous recombination, resulting in targeted mutations. Known in the art are currently four families of engineered nucleases which can be used for the puposes of the present invention: meganucleases, zinc finger nucleases (ZFNs), transcription activator-like effector-based nucleases (TALEN), and the CRISPR-Cas system. For references, see, for example, Esvelt, K M. and Wang, H H. (2013) “Genome-scale engineering for systems and synthetic biology”, Mol Syst Biol. 9 (1): 641; Tan, W S. et al., (2012) “Precision editing of large animal genomes”, Adv Genet. 80: 37-97; Puchta, H. and Fauser, F. (2013) “Gene targeting in plants: 25 years later”, Int. J. Dev. Biol. 57: 629-637; Boglioli, Elsy and Richard, Magali “Rewriting the book of life: a new era in precision genome editing”, Boston Consulting Group, Retrieved Nov. 30, 2015; Method of the Year 2011. Nat Meth 9 (1), 1-1.

[0476] The plant of the present invention comprises at least one mutated CESA nucleic acid or over-expressed wild-type CESA nucleic acid, and has increased tolerance to a CESA-inhibiting herbicide as compared to a wild-type variety of the plant. It is possible for the plants of the present invention to have multiple mutated CESA nucleic acids from different genomes since these plants can contain more than one genome. For example, a plant contains two genomes, usually referred to as the A and B genomes. Because CESA is a required metabolic enzyme, it is assumed that each genome has at least one gene coding for the CESA enzyme (i.e. at least one CESA gene). As used herein, the term “CESA gene locus” refers to the position of a CESA gene on a genome, and the terms “CESA gene” and “CESA nucleic acid” refer to a nucleic acid encoding the CESA enzyme. The CESA nucleic acid on each genome differs in its nucleotide sequence from a CESA nucleic acid on another genome. One of skill in the art can determine the genome of origin of each CESA nucleic acid through genetic crossing and/or either sequencing methods or exonuclease digestion methods known to those of skill in the art.

[0477] The present invention includes plants comprising one, two, three, or more mutated CESA alleles, wherein the plant has increased tolerance to a CESA-inhibiting herbicide as compared to a wild-type variety of the plant. The mutated CESA alleles can comprise a nucleotide sequence selected from the group consisting of a polynucleotide as defined in SEQ ID NO: 84, 85, 86, 87, 88, 89, 90, 91, 92, 93, 94, 95, 96, 97, or 98, or a variant or derivative thereof, a polynucleotide encoding a polypeptide as defined in SEQ ID NO: 1, 2, 3, 4, 5, 6, 7, 8, 9, 10, 11, 12, 13, 14, 15, 16, 17, 18, 19, 20, 21, 22, 23, 24, 25, 26, 27, 28, 29, 30, 31, 32, 33, 34, 35, 36, 37, 38, 39, 40, 41, 42, 43, 44, 45, 46, 47, 48, 49, 50, 51, 52, 53, 54, 55, 56, 57, 58, 59, 60, 61, 62, 63, 64, 65, 66, 67, 68, 69, 70, 71, 72, 73, 74, 75, 76, 77, 78, 79, 80, 81, 82 or 83, or a variant or derivative, homologue, orthologue, paralogue thereof, a polynucleotide comprising at least 60 consecutive nucleotides of any of the aforementioned polynucleotides; and a polynucleotide complementary to any of the aforementioned polynucleotides.

[0478] “Alleles” or “allelic variants” are alternative forms of a given gene, located at the same chromosomal position. Allelic variants encompass Single Nucleotide Polymorphisms (SNPs), as well as Small Insertion/Deletion Polymorphisms (INDELs). The size of INDELs is usually less than 100 bp. SNPs and INDELs form the largest set of sequence variants in naturally occurring polymorphic strains of most organisms

[0479] The term “variety” refers to a group of plants within a species defined by the sharing of a common set of characteristics or traits accepted by those skilled in the art as sufficient to distinguish one cultivar or variety from another cultivar or variety. There is no implication in either term that all plants of any given cultivar or variety will be genetically identical at either the whole gene or molecular level or that any given plant will be homozygous at all loci. A cultivar or variety is considered “true breeding” for a particular trait if, when the true-breeding cultivar or variety is self-pollinated, all of the progeny contain the trait. The terms “breeding line” or “line” refer to a group of plants within a cultivar defined by the sharing of a common set of characteristics or traits accepted by those skilled in the art as sufficient to distinguish one breeding line or line from another breeding line or line. There is no implication in either term that all plants of any given breeding line or line will be genetically identical at either the whole gene or molecular level or that any given plant will be homozygous at all loci. A breeding line or line is considered “true breeding” for a particular trait if, when the true-breeding line or breeding line is self-pollinated, all of the progeny contain the trait. In the present invention, the trait arises from a mutation in a CESA gene of the plant or seed.

[0480] The herbicide-resistant plants of the invention that comprise polynucleotides encoding mutated CESA polypeptides also find use in methods for increasing the herbicide-resistance of a plant through conventional plant breeding involving sexual reproduction. The methods comprise crossing a first plant that is a herbicide-resistant plant of the invention to a second plant that may or may not be resistant to the same herbicide or herbicides as the first plant or may be resistant to different herbicide or herbicides than the first plant. The second plant can be any plant that is capable of producing viable progeny plants (i.e., seeds) when crossed with the first plant. Typically, but not necessarily, the first and second plants are of the same species. The methods can optionally involve selecting for progeny plants that comprise the mutated CESA polypeptides of the first plant and the herbicide resistance characteristics of the second plant. The progeny plants produced by this method of the present invention have increased resistance to a herbicide when compared to either the first or second plant or both. When the first and second plants are resistant to different herbicides, the progeny plants will have the combined herbicide tolerance characteristics of the first and second plants. The methods of the invention can further involve one or more generations of backcrossing the progeny plants of the first cross to a plant of the same line or genotype as either the first or second plant. Alternatively, the progeny of the first cross or any subsequent cross can be crossed to a third plant that is of a different line or genotype than either the first or second plant. The present invention also provides plants, plant organs, plant tissues, plant cells, seeds, and non-human host cells that are transformed with the at least one polynucleotide molecule, expression cassette, or transformation vector of the invention. Such transformed plants, plant organs, plant tissues, plant cells, seeds, and non-human host cells have enhanced tolerance or resistance to at least one herbicide, at levels of the herbicide that kill or inhibit the growth of an untransformed plant, plant tissue, plant cell, or non-human host cell, respectively. Preferably, the transformed plants, plant tissues, plant cells, and seeds of the invention are Arabidopsis thaliana and crop plants.

[0481] It is to be understood that the plant of the present invention can comprise a wild type CESA nucleic acid in addition to a mutated CESA nucleic acid. It is contemplated that the CESA-inhibiting herbicide tolerant lines may contain a mutation in only one of multiple CESA isoenzymes. Therefore, the present invention includes a plant comprising one or more mutated CESA nucleic acids in addition to one or more wild type CESA nucleic acids.

[0482] In another embodiment, the invention refers to a seed produced by a transgenic plant comprising a plant cell of the present invention, wherein the seed is true breeding for an increased resistance to a CESA-inhibiting herbicide as compared to a wild type variety of the seed.

[0483] In other aspects, CESA-inhibiting herbicides-tolerant plants of the present invention can be employed as CESA-inhibiting herbicides-tolerance trait donor lines for development, as by traditional plant breeding, to produce other varietal and/or hybrid crops containing such trait or traits. All such resulting variety or hybrids crops, containing the ancestral CESA-inhibiting herbicides-tolerance trait or traits can be referred to herein as progeny or descendant of the ancestral, CESA-inhibiting herbicides-tolerant line(s).

[0484] In other embodiments, the present invention provides a method for producing a CESA-inhibiting herbicides-tolerant plant. The method comprises: crossing a first CESA-inhibiting herbicides-tolerant plant with a second plant to produce a CESA-inhibiting herbicides-tolerant progeny plant, wherein the first plant and the progeny plant comprise in at least some of their cells a polynucleotide operably linked to a promoter operable in plant cells, the recombinant polynucleotide being effective in the cells of the first plant to express a mutated CESA polypeptide encoded by the polynucleotide, the expression of the mutated CESA polypeptide conferring to the plant tolerance to CESA-inhibiting herbicides.

[0485] In some embodiments, traditional plant breeding is employed whereby the CESA-inhibiting herbicides-tolerant trait is introduced in the progeny plant resulting therefrom. In one embodiment, the present invention provides a method for producing a CESA-inhibiting herbicides-tolerant progeny plant, the method comprising: crossing a parent plant with a CESA-inhibiting herbicides-tolerant plant to introduce the CESA-inhibiting herbicides-tolerance characteristics of the CESA-inhibiting herbicides-tolerant plant into the germplasm of the progeny plant, wherein the progeny plant has increased tolerance to the CESA-inhibiting herbicides relative to the parent plant. In other embodiments, the method further comprises the step of introgressing the CESA-inhibiting herbicides-tolerance characteristics through traditional plant breeding techniques to obtain a descendent plant having the CESA-inhibiting herbicides-tolerance characteristics.

[0486] In other aspects, plants of the invention include those plants which, in addition to being CESA-inhibiting herbicides-tolerant, have been subjected to further genetic modifications by breeding, mutagenesis or genetic engineering, e.g. have been rendered tolerant to applications of specific other classes of herbicides, such as AHAS inhibitors; auxinic herbicides; bleaching herbicides such as hydroxyphenylpyruvate dioxygenase (HPPD) inhibitors or phytoene desaturase (PDS) inhibitors; EPSPS inhibitors such as glyphosate; glutamine synthetase (GS) inhibitors such as glufosinate; lipid biosynthesis inhibitors such as acetyl CoA carboxylase (ACCase) inhibitors; or oxynil {i.e. bromoxynil or ioxynil) herbicides as a result of conventional methods of breeding or genetic engineering, Thus, CESA-inhibiting herbicides-tolerant plants of the invention can be made resistant to multiple classes of herbicides through multiple genetic modifications, such as resistance to both glyphosate and glufosinate or to both glyphosate and a herbicide from another class such as HPPD inhibitors, AHAS inhibitors, or ACCase inhibitors. These herbicide resistance technologies are, for example, described in Pest Management Science (at volume, year, page): 61, 2005, 246; 61, 2005, 258; 61, 2005, 277; 61, 2005, 269; 61, 2005, 286; 64, 2008, 326; 64, 2008, 332; Weed Science 57, 2009, 108; Australian Journal of Agricultural Research 58, 2007, 708; Science 316, 2007, 1185; and references quoted therein. For example, CESA-inhibiting herbicides-tolerant plants of the invention, in some embodiments, may be tolerant to ACCase inhibitors, such as “dims” {e.g., cycloxydim, sethoxydim, clethodim, or tepraloxydim), “fops” {e.g., clodinafop, diclofop, fluazifop, haloxyfop, or quizalofop), and “dens” (such as pinoxaden); to auxinic herbicides, such as dicamba; to EPSPS inhibitors, such as glyphosate; to other CESA inhibitors; and to GS inhibitors, such as glufosinate.

[0487] In addition to these classes of inhibitors, CESA-inhibiting herbicides-tolerant plants of the invention may also be tolerant to herbicides having other modes of action, for example, chlorophyll/carotenoid pigment inhibitors, cell membrane disrupters, photosynthesis inhibitors, cell division inhibitors, root inhibitors, shoot inhibitors, and combinations thereof.

[0488] Such tolerance traits may be expressed, e.g.: as mutant or wildtype HPPD proteins, as mutant AHASL proteins, mutant ACCase proteins, mutant EPSPS proteins, or mutant glutamine synthetase proteins; or as mutant native, inbred, or transgenic aryloxyalkanoate dioxygenase (AAD or DHT), haloarylnitrilase (BXN), 2,2-dichloropropionic acid dehalogenase (DEH), glyphosate-N-acetyltransferase (GAT), glyphosate decarboxylase (GDC), glyphosate oxidoreductase (GOX), glutathione-S-transferase (GST), phosphinothricin acetyltransferase (PAT or bar), or CYP450s proteins having an herbicide-degrading activity. CESA-inhibiting herbicides-tolerant plants hereof can also be stacked with other traits including, but not limited to, pesticidal traits such as Bt Cry and other proteins having pesticidal activity toward coleopteran, lepidopteran, nematode, or other pests; nutrition or nutraceutical traits such as modified oil content or oil profile traits, high protein or high amino acid concentration traits, and other trait types known in the art.

[0489] Furthermore, in other embodiments, CESA-inhibiting herbicides-tolerant plants are also covered which are, by the use of recombinant DNA techniques and/or by breeding and/or otherwise selected for such characteristics, rendered able to synthesize one or more insecticidal proteins, especially those known from the bacterial genus Bacillus, particularly from Bacillus thuringiensis, such as [delta]-endotoxins, e.g. CryIA(b), CryIA(c), CryIF, CryIF(a2), CryIIA(b), CryIIIA, CryIIIB(b1) or Cry9c; vegetative insecticidal proteins (VIP), e.g. VIP1, VIP2, VIP3 or VIP3A; insecticidal proteins of bacteria colonizing nematodes, e.g. Photorhabdus spp. or Xenorhabdus spp.; toxins produced by animals, such as scorpion toxins, arachnid toxins, wasp toxins, or other insect-specific neurotoxins; toxins produced by fungi, such streptomycete toxins; plant lectins, such as pea or barley lectins; agglutinins; proteinase inhibitors, such as trypsin inhibitors, serine protease inhibitors, patatin, cystatin or papain inhibitors; ribosome-inactivating proteins (RIP), such as ricin, maize-RIP, abrin, luffin, saporin or bryodin; steroid metabolism enzymes, such as 3-hydroxy-steroid oxidase, ecdysteroid-IDP-glycosyl-transferase, cholesterol oxidases, ecdysone inhibitors or HMG-CoA-reductase; ion channel blockers, such as blockers of sodium or calcium channels; juvenile hormone esterase; diuretic hormone receptors (helicokinin receptors); stilben synthase, bibenzyl synthase, chitinases or glucanases. In the context of the present invention these insecticidal proteins or toxins are to be understood expressly also as pre-toxins, hybrid proteins, truncated or otherwise modified proteins. Hybrid proteins are characterized by a new combination of protein domains, (see, e.g. WO 02/015701). Further examples of such toxins or genetically modified plants capable of synthesizing such toxins are disclosed, e.g., in EP-A 374 753, WO 93/007278, WO 95/34656, EP-A 427 529, EP-A 451 878, WO 03/18810 and WO 03/52073. The methods for producing such genetically modified plants are generally known to the person skilled in the art and are described, e.g. in the publications mentioned above. These insecticidal proteins contained in the genetically modified plants impart to the plants producing these proteins tolerance to harmful pests from all taxonomic groups of arthropods, especially to beetles (Coeloptera), two-winged insects (Diptera), and moths (Lepidoptera) and to nematodes (Nematoda).

[0490] In some embodiments, expression of one or more protein toxins (e.g., insecticidal proteins) in the CESA-inhibiting herbicides-tolerant plants is effective for controlling organisms that include, for example, members of the classes and orders: Coleoptera such as the American bean weevil Acanthoscelides obtectus; the leaf beetle Agelastica alni; click beetles (Agriotes lineatus, Agriotes obscurus, Agriotes bicolor); the grain beetle Ahasverus advena; the summer schafer Amphimallon solstitialis; the furniture beetle Anobium punctatum; Anthonomus spp. (weevils); the Pygmy mangold beetle Atomaria linearis; carpet beetles (Anthrenus spp., Attagenus spp.); the cowpea weevil Callosobruchus maculates; the fried fruit beetle Carpophilus hemipterus; the cabbage seedpod weevil Ceutorhynchus assimilis; the rape winter stem weevil Ceutorhynchus picitarsis; the wireworms Conoderus vespertinus and Conoderus falli; the banana weevil Cosmopolites sordidus; the New Zealand grass grub Costelytra zealandica; the June beetle Cotinis nitida; the sunflower stem weevil

[0491] Cylindrocopturus adspersus; the larder beetle Dermestes lardarius; the corn rootworms Diabrotica virgifera, Diabrotica virgifera virgifera, and Diabrotica barberi; the Mexican bean beetle Epilachna varivestis; the old house borer Hylotropes bajulus; the lucerne weevil Hypera postica; the shiny spider beetle Gibbium psylloides; the cigarette beetle Lasioderma serricorne; the Colorado potato beetle Leptinotarsa decemlineata; Lyctus beetles {Lyctus spp., the pollen beetle Meligethes aeneus; the common cockshafer Melolontha melolontha; the American spider beetle Mezium americanum; the golden spider beetle Niptus hololeuc s; the grain beetles Oryzaephilus surinamensis and Oryzaephilus Mercator; the black vine weevil Otiorhynchus sulcatus; the mustard beetle Phaedon cochleariae, the crucifer flea beetle Phyllotreta cruciferae; the striped flea beetle Phyllotreta striolata; the cabbage steam flea beetle Psylliodes chrysocephala; Ptinus spp. (spider beetles); the lesser grain borer Rhizopertha dominica; the pea and been weevil Sitona lineatus; the rice and granary beetles Sitophilus oryzae and Sitophilus granaries; the red sunflower seed weevil Smicronyx fulvus; the drugstore beetle Stegobium paniceum; the yellow mealworm beetle Tenebrio molitor, the flour beetles Tribolium castaneum and Tribolium confusum; warehouse and cabinet beetles {Trogoderma spp.); the sunflower beetle Zygogramma exclamationis; Dermaptera (earwigs) such as the European earwig Forficula auricularia and the striped earwig Labidura riparia; Dictyoptera such as the oriental cockroach Blatta orientalis; the greenhouse millipede Oxidus gracilis; the beet fly Pegomyia betae; the frit fly Oscinella frit; fruitflies (Dacus spp., Drosophila spp.); Isoptera (termites) including species from the familes Hodotermitidae, Kalotermitidae, Mastotermitidae, Rhinotermitidae, Serritermitidae, Termitidae, Termopsidae; the tarnished plant bug Lygus lineolaris; the black bean aphid Aphis fabae; the cotton or melon aphid Aphis gossypii; the green apple aphid Aphis pomi; the citrus spiny whitefly Aleurocanthus spiniferus; the sweet potato whitefly Bemesia tabaci; the cabbage aphid Brevicoryne brassicae; the pear psylla Cacopsylla pyricola; the currant aphid Cryptomyzus ribis; the grape phylloxera Daktulosphaira vitifoliae; the citrus psylla Diaphorina citri; the potato leafhopper Empoasca fabae; the bean leafhopper Empoasca Solana; the vine leafhopper Empoasca vitis; the woolly aphid Eriosoma lanigerum; the European fruit scale Eulecanium corni; the mealy plum aphid Hyalopterus arundinis; the small brown planthopper Laodelphax striatellus; the potato aphid Macrosiphum euphorbiae; the green peach aphid Myzus persicae; the green rice leafhopper Nephotettix cinticeps; the brown planthopper Nilaparvata lugens; the hop aphid Phorodon humuli; the bird-cherry aphid Rhopalosiphum padi; the grain aphid Sitobion avenae; Lepidoptera such as Adoxophyes orana (summer fruit tortrix moth); Archips podana (fruit tree tortrix moth); Bucculatrix pyrivorella (pear leafminer); Bucculatrix thurberiella (cotton leaf perforator); Bupalus piniarius (pine looper); Carpocapsa pomonella (codling moth); Chilo suppressalis (striped rice borer); Choristoneura fumiferana (eastern spruce budworm); Cochylis hospes (banded sunflower moth); Diatraea grandiosella (southwestern corn borer); Eupoecilia ambiguella (European grape berry moth); Helicoverpa armigera (cotton bollworm); Helicoverpa zea (cotton bollworm); Heliothis virescens (tobacco budworm), Homeosoma electellum (sunflower moth); Homona magnanima (oriental tea tree tortrix moth); Lithocolletis blancardella (spotted tentiform leafminer); Lymantria dispar (gypsy moth); Malacosoma neustria (tent caterpillar); Mamestra brassicae (cabbage armyworm); Mamestra configurata (Bertha armyworm); Operophtera brumata (winter moth); Ostrinia nubilalis (European corn borer), Panolis flammea (pine beauty moth), Phyllocnistis citrella (citrus leafminer); Pieris brassicae (cabbage white butterfly); Rachiplusia ni (soybean looper); Spodoptera exigua (beet armywonn); Spodoptera littoralis (cotton leafworm); Sylepta derogata (cotton leaf roller); Trichoplusia ni (cabbage looper); Orthoptera such as the common cricket Acheta domesticus, tree locusts (Anacridium spp.), the migratory locust Locusta migratoria, the twostriped grasshopper Melanoplus bivittatus, the differential grasshopper Melanoplus differ entialis, the redlegged grasshopper Melanoplus femurrubrum, the migratory grasshopper Melanoplus sanguinipes, the northern mole cricket Neocurtilla hexadectyla, the red locust Nomadacris septemfasciata, the shortwinged mole cricket Scapteriscus abbreviatus, the southern mole cricket Scapteriscus borellii, the tawny mole cricket Scapteriscus vicinus, and the desert locust Schistocerca gregaria; Symphyla such as the garden symphylan Scutigerella immaculate; Thysanoptera such as the tobacco thrips Frankliniella fusca, the flower thrips Frankliniella intonsa, the western flower thrips Frankliniella occidentalism the cotton bud thrips Frankliniella schultzei, the banded greenhouse thrips Hercinothrips femoralis, the soybean thrips Neohydatothrips variabilis, Kelly's citrus thrips Pezothrips kellyanus, the avocado thrips Scirtothrips perseae, the melon thrips Thrips palmi, and the onion thrips Thrips tabaci; and the like, and combinations comprising one or more of the foregoing organisms.

[0492] In some embodiments, expression of one or more protein toxins (e.g., insecticidal proteins) in the CESA-inhibiting herbicides-tolerant plants is effective for controlling flea beetles, i.e. members of the flea beetle tribe of family Chrysomelidae, preferably against Phyllotreta spp., such as Phyllotreta cruciferae and/or Phyllotreta triolata. In other embodiments, expression of one or more protein toxins {e.g., insecticidal proteins) in the CESA-inhibiting herbicides-tolerant plants is effective for controlling cabbage seedpod weevil, the Bertha armyworm, Lygus bugs, or the diamondback moth.

[0493] Furthermore, in one embodiment, CESA-inhibiting herbicides-tolerant plants are also covered which are, e.g. by the use of recombinant DNA techniques and/or by breeding and/or otherwise selected for such traits, rendered able to synthesize one or more proteins to increase the resistance or tolerance of those plants to bacterial, viral or fungal pathogens. The methods for producing such genetically modified plants are generally known to the person skilled in the art.

[0494] Furthermore, in another embodiment, CESA-inhibiting herbicides-tolerant plants are also covered which are, e.g. by the use of recombinant DNA techniques and/or by breeding and/or otherwise selected for such traits, rendered able to synthesize one or more proteins to increase the productivity (e.g. oil content), tolerance to drought, salinity or other growth-limiting environmental factors or tolerance to pests and fungal, bacterial or viral pathogens of those plants.

[0495] Furthermore, in other embodiments, CESA-inhibiting herbicides-tolerant plants are also covered which are, e.g. by the use of recombinant DNA techniques and/or by breeding and/or otherwise selected for such traits, altered to contain a modified amount of one or more substances or new substances, for example, to improve human or animal nutrition, e.g. oil crops that produce health-promoting long-chain omega-3 fatty acids or unsaturated omega-9 fatty acids (e.g. Nexera® rape, Dow Agro Sciences, Canada).

[0496] Furthermore, in some embodiments, CESA-inhibiting herbicides-tolerant plants are also covered which are, e.g. by the use of recombinant DNA techniques and/or by breeding and/or otherwise selected for such traits, altered to contain increased amounts of vitamins and/or minerals, and/or improved profiles of nutraceutical compounds.

[0497] In one embodiment, CESA-inhibiting herbicides-tolerant plants of the present invention, relative to a wild-type plant, comprise an increased amount of, or an improved profile of, a compound selected from the group consisting of: glucosinolates (e.g., glucoraphanin (4-methylsulfinylbutyl-glucosinolate), sulforaphane, 3-indolylmethyl-glucosinolate(glucobrassicin), I-methoxy-3-indolylmethyl-glucosinolate (neoglucobrassicin)); phenolics (e.g., flavonoids (e.g., quercetin, kaempferol), hydroxycinnamoyl derivatives (e.g., 1,2,2′-trisinapoylgentiobiose, 1,2-diferuloylgentiobiose, 1,2′-disinapoyl-2-feruloylgentiobiose, 3-O-caffeoyl-quinic (neochlorogenic acid)); and vitamins and minerals (e.g., vitamin C, vitamin E, carotene, folic acid, niacin, riboflavin, thiamine, calcium, iron, magnesium, potassium, selenium, and zinc).

[0498] In another embodiment, CESA-inhibiting herbicides-tolerant plants of the present invention, relative to a wild-type plant, comprise an increased amount of, or an improved profile of, a compound selected from the group consisting of: progoitrin; isothiocyanates; indoles (products of glucosinolate hydrolysis); glutathione; carotenoids such as beta-carotene, lycopene, and the xanthophyll carotenoids such as lutein and zeaxanthin; phenolics comprising the flavonoids such as the flavonols (e.g. quercetin, rutin), the flavans/tannins (such as the procyanidins comprising coumarin, proanthocyanidins, catechins, and anthocyanins); flavones; phytoestrogens such as coumestans, lignans, resveratrol, isoflavones e.g. genistein, daidzein, and glycitein; resorcyclic acid lactones; organosulphur compounds; phytosterols; terpenoids such as carnosol, rosmarinic acid, glycyrrhizin and saponins; chlorophyll; chlorphyllin, sugars, anthocyanins, and vanilla.

[0499] In other embodiments, CESA-inhibiting herbicides-tolerant plants of the present invention, relative to a wild-type plant, comprise an increased amount of, or an improved profile of, a compound selected from the group consisting of: vincristine, vinblastine, taxanes (e.g., taxol (paclitaxel), baccatin III, 10-desacetylbaccatin III, 10-desacetyl taxol, xylosyl taxol, 7-epitaxol, 7-epibaccatin III, 10-desacetylcephalomannine, 7-epicephalomannine, taxotere, cephalomannine, xylosyl cephalomannine, taxagifine, 8-benxoyloxy taxagifine, 9-acetyloxy taxusin, 9-hydroxy taxusin, taiwanxam, taxane Ia, taxane Ib, taxane Ic, taxane Id, GMP paclitaxel, 9-dihydro 13-acetylbaccatin III, 10-desacetyl-7-epitaxol, tetrahydrocannabinol (THC), cannabidiol (CBD), genistein, diadzein, codeine, morphine, quinine, shikonin, ajmalacine, serpentine, and the like.

[0500] In other aspects, a method for treating a plant of the present invention is provided.

[0501] In some embodiments, the method comprises contacting the plant with an agronomically acceptable composition. In one embodiment, the agronomically acceptable composition comprises a CESA inhibiting herbicide A. I, such as an azine as described herein.

[0502] In another aspect, the present invention provides a method for preparing a descendent seed. The method comprises planting a seed of or capable of producing a plant of the present invention. In one embodiment, the method further comprises growing a descendent plant from the seed; and harvesting a descendant seed from the descendent plant. In other embodiments, the method further comprises applying a CESA-inhibiting herbicides herbicidal composition to the descendent plant.

[0503] In another embodiment, the invention refers to harvestable parts of the plant according to the present invention. Preferably, the harvestable parts comprise the CESA nucleic acid or CESA protein of the present invention. The harvestable parts may be seeds, roots, leaves and/or flowers comprising the CESA nucleic acid or CESA protein or parts thereof. Preferred parts of soy plants are soy beans comprising the CESA nucleic acid or CESA protein.

[0504] In another embodiment, the invention refers to products derived from a plant according to the present invention, parts thereof or harvestable parts thereof. A preferred plant product is fodder, seed meal, oil, or seed-treatment-coated seeds. Preferably, the meal and/or oil comprise the CESA nucleic acids or CESA proteins.

[0505] In another embodiment, the invention refers to a method for the production of a product, which method comprises
[0506] a) growing the plants of the invention or obtainable by the methods of invention and
[0507] b) producing said product from or by the plants of the invention and/or parts, e.g. seeds, of these plants.

[0508] In a further embodiment the method comprises the steps
[0509] a) growing the plants of the invention,
[0510] b) removing the harvestable parts as defined above from the plants and
[0511] c) producing said product from or by the harvestable parts of the invention.

[0512] The product may be produced at the site where the plant has been grown, the plants and/or parts thereof may be removed from the site where the plants have been grown to produce the product. Typically, the plant is grown, the desired harvestable parts are removed from the plant, if feasible in repeated cycles, and the product made from the harvestable parts of the plant. The step of growing the plant may be performed only once each time the methods of the invention is performed, while allowing repeated times the steps of product production e.g. by repeated removal of harvestable parts of the plants of the invention and if necessary further processing of these parts to arrive at the product. It is also possible that the step of growing the plants of the invention is repeated and plants or harvestable parts are stored until the production of the product is then performed once for the accumulated plants or plant parts. Also, the steps of growing the plants and producing the product may be performed with an overlap in time, even simultaneously to a large extend or sequentially. Generally the plants are grown for some time before the product is produced.

[0513] In one embodiment the products produced by said methods of the invention are plant products such as, but not limited to, a foodstuff, feedstuff, a food supplement, feed supplement, fiber, cosmetic and/or pharmaceutical. Foodstuffs are regarded as compositions used for nutrition and/or for supplementing nutrition. Animal feedstuffs and animal feed supplements, in particular, are regarded as foodstuffs.

[0514] In another embodiment the inventive methods for the production are used to make agricultural products such as, but not limited to, plant extracts, proteins, amino acids, carbohydrates, fats, oils, polymers, vitamins, and the like.

[0515] It is possible that a plant product consists of one or more agricultural products to a large extent.

[0516] Herbicides

[0517] As decribed above, the present invention provides nucleic acids, polypeptides, conferring tolerance of plants to compounds/herbicides interfering or inhibiting cell wall (cellulose) biosynthesis by interfering with the activity of cellulose synthase (“CESA-inhibiting herbicides”), also known to the person skilled in the art as Cellulose Biosynthesis Inhibitors (CBI).

[0518] Examples of herbicides which can be used according to the present invention, i.e. to which the plants according to the present invention are tolerant/resistant to, are compounds known to the skilled artisan as azines. Examples of Azines are described in detail in the following patent applications depicted in the following Table 1, which are incorporated by reference in its entirety.

TABLE 1

| | | | Publication or |
|---|---|---|---|
| | | | Application |
| | | | number/Internal |
| No.: | Structural Formula | | reference |
| 1 | [chemical structure] | I | WO 2014/064094 PF74283 |
| 2 | [chemical structure] | (I) | WO 2015/007711 PF75365 |
| 3 | [chemical structure] | (I) | WO 2015/144881 PF76068 |
| 4 | [chemical structure] | (I) | WO 2015/150541 PF76069 |
| 5 | [chemical structure] | (I) | EP 14163742.1 PF76635 |
| 6 | [chemical structure] | (I) | EP 14163743.9 PF76636 |
| 7 | [chemical structure] | | WO 2015/162166 PF76857 |
| 8 | [chemical structure] | | WO 2015/162169 PF76888 |
| 9 | [chemical structure] | | WO 2015/155271 PF76890 |
| 10 | [chemical structure] | | WO 2015/155272 PF76930 |
| 11 | [chemical structure] | (I) | WO 2015/155273 PF77027 |
| 12 | [chemical structure] | | Indaziflam |
| 13 | [chemical structure] | | Triazofenamid |
| 14 | 1-[4-chloro-3-(2,2,3,3,3- | | Flupoxam |
| | pentafluoropropoxymethyl)phenyl]-5-phenyl-1,2,4- | | |
| | triazole-3-carboxamide | | |

[0519] Examples of preferred CESA inhibiting herbicides from the group of so-called azines which can be used according to the present invention are compounds having the Formula (I), known to the skilled artisan as azines.

[chemical structure]

[0520] wherein
[0521] A is phenyl, which is substituted by two to five substituents selected from the group consisting of halogen, CN, NO₂, C₁-C₆-alkyl, C₁-C₆-haloalkyl, C₂-C₆-alkenyl, C₂-C₆-haloalkenyl, C₂-C₆-alkynyl, C₁-C₆-haloalkynyl, OH, C₁-C₆-alkoxy, C₁-C₆-alkylthio, (C₁-C₆-alkyl)sulfinyl, (C₁-C₆-alkyl)sulfonyl, amino, (C₁-C₆-alkyl)amino, di(C₁-C₆-alkyl)amino, (C₁-C₆-alkyl)carbonyl, (C₁-C₆-alkoxy)carbonyl;
[0522] R¹ H, CN, C₁-C₆-alkyl, C₁-C₆-haloalkyl, C₁-C₆-alkoxy-C₁-C₆-alkyl, C₁-C₆-alkoxy, (C₁-C₆-alkyl)carbonyl, (C₁-C₆-alkoxy)carbonyl, (C₁-C₆-alkyl)sulfonyl or phenylsulfonyl,
   [0523] wherein the phenyl is unsubstituted or substituted by one to five substituents selected from the group consisting of halogen, CN, NO₂, C₁-C₆-alkyl, C₁-C₆-haloalkyl and C₁-C₆-alkoxy;
[0524] R² H, halogen, CN, C₁-C₆-alkyl, C₁-C₆-haloalkyl, C₂-C₆-alkenyl, C₃-C₆-alkynyl, C₃-C₆-cycloalkyl, C₃-C₆-cycloalkenyl, OH, C₁-C₆-alkoxy or C₁-C₆-alkoxy-C₁-C₆-alkyl;
[0525] R³ H, halogen, CN, C₁-C₆-alkyl, C₁-C₆-haloalkyl or C₁-C₆-alkoxy;
[0526] R⁴ H, halogen, CN, C₁-C₆-alkyl or C₁-C₆-haloalkyl; or
[0527] R³ and R⁴ together with the carbon atom to which they are attached form a moiety selected from the group consisting of carbonyl, C₂-C₆-alkenyl, C₃-C₆-cycloalkyl, C₃-C₆-cycloalkenyl and three- to six-membered heterocyclyl,
   [0528] wherein the C₃-C₆-cycloalkyl, C₃-C₆-cycloalkenyl, or three- to six-membered heterocyclyl is unsubstituted or substituted by one to three substituents selected from halogen, CN, C₁-C₆-alkyl and C₁-C₆-alkoxy; and
[0529] R⁵ H, CN, C₁-C₆-alkyl, C₁-C₆-haloalkyl, C₁-C₆-alkoxy-C₁-C₆-alkyl, C₁-C₆-alkoxy, (C₁-C₆-alkyl)carbonyl, (C₁-C₆-alkoxy)carbonyl, (C₁-C₆-alkyl)sulfonyl or phenylsulfonyl,
   [0530] wherein the phenyl is unsubstituted or substituted by one to five substituents selected from the group consisting of halogen, CN, NO₂, C₁-C₆-alkyl, C₁-C₆-haloalkyl and C₁-C₆-alkoxy;

[0531] including their agriculturally acceptable salts or N-oxides.

[0532] Preferably the present invention provides azines of formula (I), wherein
[0533] A is 2-fluoro-phenyl, which is substituted by one to four substituents selected from the group consisting of halogen, CN, NO₂, C₁-C₆-alkyl, C₁-C₆-haloalkyl, OH, C₁-C₆-alkoxy, C₁-C₆-alkylthio, (C₁-C₆-alkyl)sulfinyl, (C₁-C₆-alkyl)sulfonyl, amino, (C₁-C₆-alkyl)amino, di(C₁-C₆-alkyl)amino, (C₁-C₆-alkyl)carbonyl and (C₁-C₆-alkoxy)-carbonyl;
[0534] R¹ H, CN, C₁-C₆-alkyl, C₁-C₆-haloalkyl, C₁-C₆-alkoxy-C₁-C₆-alkyl, C₁-C₆-alkoxy, (C₁-C₆-alkyl)carbonyl, (C₁-C₆-alkoxy)carbonyl, (C₁-C₆-alkyl)sulfonyl or phenylsulfonyl,
   [0535] wherein the phenyl is unsubstituted or substituted by one to five substituents selected from the group consisting of halogen, CN, NO₂, C₁-C₆-alkyl, C₁-C₆-haloalkyl and C₁-C₆-alkoxy;
[0536] R² H, halogen, CN, C₁-C₆-alkyl, C₁-C₆-haloalkyl, C₂-C₆-alkenyl, C₃-C₆-alkynyl, C₃-C₆-cycloalkyl, C₃-C₆-cycloalkenyl, OH, C₁-C₆-alkoxy or C₁-C₆-alkoxy-C₁-C₆-alkyl;
[0537] R³ H, halogen, CN, C₁-C₆-alkyl, C₁-C₆-haloalkyl or C₁-C₆-alkoxy;
[0538] R⁴ H, halogen, CN, C₁-C₆-alkyl or C₁-C₆-haloalkyl; or
[0539] R³ and R⁴ together with the carbon atom to which they are attached form a moiety selected from the group consisting of carbonyl, C₂-C₆-alkenyl, C₃-C₆-cycloalkyl, C₃-C₆-cycloalkenyl and three- to six-membered heterocyclyl,
   [0540] wherein the C₃-C₆-cycloalkyl, C₃-C₆-cycloalkenyl or and three- to six-membered heterocyclyl is unsubstituted or substituted by one to three substituents selected from halogen, CN, C₁-C₆-alkyl and C₁-C₆-alkoxy; and
[0541] R⁵ H, CN, C₁-C₆-alkyl, C₁-C₆-haloalkyl, C₁-C₆-alkoxy-C₁-C₆-alkyl, C₁-C₆-alkoxy, (C₁-C₆-alkyl)carbonyl, (C₁-C₆-alkoxy)carbonyl, (C₁-C₆-alkyl)sulfonyl or phenylsulfonyl, wherein the phenyl is unsubstituted or substituted by one to five substituents selected from the group consisting of halogen, CN, NO₂, C₁-C₆-alkyl, C₁-C₆-haloalkyl and C₁-C₆-alkoxy;
[0542] including their agriculturally acceptable salts or N-oxides.

[0543] Useful for the present invention are also agrochemical compositions comprising at least one azines of formula (I) and auxiliaries customary for formulating crop protection agents.

[0544] The present invention also provides the use of azines of formula (I) as herbicides, i.e. for controlling harmful plants.

[0545] If the azines of formula (I) as described herein are capable of forming geometrical isomers, for example E/Z isomers, it is possible to use both, the pure isomers and mixtures thereof, in the compositions according to the invention.

[0546] If the azines of formula (I) as described herein have one or more centres of chirality and, as a consequence, are present as enantiomers or diastereomers, it is possible to use both, the pure enantiomers and diastereomers and their mixtures, in the compositions according to the invention.

[0547] If the azines of formula (I) as described herein have ionizable functional groups, they can also be employed in the form of their agriculturally acceptable salts. Suitable are, in general, the salts of those cations and the acid addition salts of those acids whose cations and anions, respectively, have no adverse effect on the activity of the active compounds.

[0548] Preferred cations are the ions of the alkali metals, preferably of lithium, sodium and potassium, of the alkaline earth metals, preferably of calcium and magnesium, and of the transition metals, preferably of manganese, copper, zinc and iron, further ammonium and substituted ammonium in which one to four hydrogen atoms are replaced by C₁-C₄-alkyl, hydroxy-C₁-C₄-alkyl, C₁-C₄-alkoxy-C₁-C₄-alkyl, hydroxy-C₁-C₄-alkoxy-C₁-C₄-alkyl, phenyl or benzyl, preferably ammonium, methylammonium, isopropylammonium, dimethylammonium, diisopropylammonium, trimethylammonium, heptylammonium, dodecylammonium, tetradecylammonium, tetramethylammonium, tetraethylammonium, tetrabutylammonium, 2-hydroxyethylammonium (olamine salt), 2-(2-hydroxyeth-1-oxy)eth-1-ylammonium (diglycolamine salt), di(2-hydroxyeth-1-yl)ammonium (diolamine salt), tris(2-hydroxyethyl)ammonium (trolamine salt), tris(2-hydroxypropyl)ammonium, benzyltrimethylammonium, benzyltriethylammonium, N,N,N-trimethylethanolammonium (choline salt), furthermore phosphonium ions, sulfonium ions, preferably tri(C₁-C₄-alkyl)sulfonium, such as trimethylsulfonium, and sulfoxonium ions, preferably tri(C₁-C₄-alkyl)sulfoxonium, and finally the salts of polybasic amines such as N,N-bis-(3-aminopropyl)methylamine and diethylenetriamine.

[0549] Anions of useful acid addition salts are primarily chloride, bromide, fluoride, iodide, hydrogensulfate, methylsulfate, sulfate, dihydrogenphosphate, hydrogenphosphate, nitrate, bicarbonate, carbonate, hexafluorosilicate, hexafluorophosphate, benzoate and also the anions of C₁-C₄-alkanoic acids, preferably formate, acetate, propionate and butyrate.

[0550] The organic moieties mentioned in the definition of the variables, e.g. R¹ to R⁵, are—like the term halogen—collective terms for individual enumerations of the individual group members. The term halogen denotes in each case fluorine, chlorine, bromine or iodine. All hydrocarbon chains, i.e. all alkyl, haloalkyl, alkenyl, alkynyl, alkoxy, alkylthio, alkylsulfinyl, alkylsulfonyl, (alkyl)amino, di(alkyl)amino chains can be straight-chain or branched, the prefix Cₙ-Cₘ denoting in each case the possible number of carbon atoms in the group.

[0551] Examples of such meanings are:
[0552] C₁-C₄-alkyl: for example CH₃, C₂H₅, n-propyl, CH(CH₃)₂, n-butyl, CH(CH₃)—C₂H₅, CH₂—CH(CH₃)₂ and C(CH₃)₃;
[0553] C₁-C₆-alkyl and also the C₁-C₆-alkyl moieties of (C₁-C₆-alkyl)carbonyl, C₁-C₆-alkyoxy-C₁-C₆-alkyl: C₁-C₄-alkyl as mentioned above, and also, for example, n-pentyl, 1-methylbutyl, 2-methylbutyl, 3-methylbutyl, 2,2-dimethylpropyl, 1-ethylpropyl, n-hexyl, 1,1-dimethylpropyl, 1,2-dimethylpropyl, 1-methylpentyl, 2-methylpentyl, 3-methylpentyl, 4-methylpentyl, 1,1-dimethylbutyl, 1,2-dimethylbutyl, 1,3-dimethylbutyl, 2,2-dimethylbutyl, 2,3-dimethylbutyl, 3,3-dimethylbutyl, 1-ethylbutyl, 2-ethylbutyl, 1,1,2-trimethylpropyl, 1,2,2-trimethylpropyl, 1-ethyl-1-methylpropyl or 1-ethyl-2-methylpropyl, preferably methyl, ethyl, n-propyl, 1-methylethyl, n-butyl, 1,1-dimethylethyl, n-pentyl or n-hexyl;
[0554] C₁-C₄-haloalkyl: a C₁-C₄-alkyl radical as mentioned above which is partially or fully substituted by fluorine, chlorine, bromine and/or iodine, for example, chloromethyl, dichloromethyl, trichloromethyl, fluoromethyl, difluoromethyl, trifluoromethyl, chlorofluoromethyl, dichlorofluoromethyl, chlorodifluoromethyl, bromomethyl, iodomethyl, 2-fluoroethyl, 2-chloroethyl, 2-bromoethyl, 2-iodoethyl, 2,2-difluoroethyl, 2,2,2-trifluoroethyl, 2-chloro-2-fluoroethyl, 2-chloro-2,2-difluoroethyl, 2,2-dichloro-2-fluoroethyl, 2,2,2-trichloroethyl, pentafluoroethyl, 2-fluoropropyl, 3-fluoropropyl, 2,2-difluoropropyl, 2,3-difluoropropyl, 2-chloropropyl, 3-chloropropyl, 2,3-dichloropropyl, 2-bromopropyl, 3-bromopropyl, 3,3,3-trifluoropropyl, 3,3,3-trichloropropyl, 2,2,3,3,3-pentafluoropropyl, heptafluoropropyl, 1-(fluoromethyl)-2-fluoroethyl, 1-(chloromethyl)-2-chloroethyl, 1-(bromomethyl)-2-bromoethyl, 4-fluorobutyl, 4-chlorobutyl, 4-bromobutyl, nonafluorobutyl, 1,1,2,2,-tetrafluoroethyl and 1-trifluoromethyl-1,2,2,2-tetrafluoroethyl;
[0555] C₁-C₆-haloalkyl: C₁-C₄-haloalkyl as mentioned above, and also, for example, 5-fluoropentyl, 5-chloropentyl, 5-bromopentyl, 5-iodopentyl, undecafluoropentyl, 6-fluorohexyl, 6-chlorohexyl, 6-bromohexyl, 6-iodohexyl and dodecafluorohexyl;
[0556] C₃-C₆-cycloalkyl: monocyclic saturated hydrocarbons having 3 to 6 ring members, such as cyclopropyl, cyclobutyl, cyclopentyl and cyclohexyl;
[0557] C₂-C₆-alkenyl: for example ethenyl, 1-propenyl, 2-propenyl, 1-methylethenyl, 1-butenyl, 2-butenyl, 3-butenyl, 1-methyl-1-propenyl, 2-methyl-1-propenyl, 1-methyl-2-propenyl, 2-methyl-2-propenyl, 1-pentenyl, 2-pentenyl, 3-pentenyl, 4-pentenyl, 1-methyl-1-butenyl, 2-methyl-1-butenyl, 3-methyl-1-butenyl, 1-methyl-2-butenyl, 2-methyl-2-butenyl, 3-methyl-2-butenyl, 1-methyl-3-butenyl, 2-methyl-3-butenyl, 3-methyl-3-butenyl, 1,1-dimethyl-2-propenyl, 1,2-dimethyl-1-propenyl, 1,2-dimethyl-2-propenyl, 1-ethyl-1-propenyl, 1-ethyl-2-propenyl, 1-hexenyl, 2-hexenyl, 3-hexenyl, 4-hexenyl, 5-hexenyl, 1-methyl-1-pentenyl, 2-methyl-1-pentenyl, 3-methyl-1-pentenyl, 4-methyl-1-pentenyl, 1-methyl-2-pentenyl, 2-methyl-2-pentenyl, 3-methyl-2-pentenyl, 4-methyl-2-pentenyl, 1-methyl-3-pentenyl, 2-methyl-3-pentenyl, 3-methyl-3-pentenyl, 4-methyl-3-pentenyl, 1-methyl-4-pentenyl, 2-methyl-4-pentenyl, 3-methyl-4-pentenyl, 4-methyl-4-pentenyl, 1,1-dimethyl-2-butenyl, 1,1-dimethyl-3-butenyl, 1,2-dimethyl-1-butenyl, 1,2-dimethyl-2-butenyl, 1,2-dimethyl-3-butenyl, 1,3-dimethyl-1-butenyl, 1,3-dimethyl-2-butenyl, 1,3-dimethyl-3-butenyl, 2,2-dimethyl-3-butenyl, 2,3-dimethyl-1-butenyl, 2,3-dimethyl-2-butenyl, 2,3-dimethyl-3-butenyl, 3,3-dimethyl-1-butenyl, 3,3-di methyl-2-butenyl, 1-ethyl-1-butenyl, 1-ethyl-2-butenyl, 1-ethyl-3-butenyl, 2-ethyl-1-butenyl, 2-ethyl-2-butenyl, 2-ethyl-3-butenyl, 1,1,2-trimethyl-2-propenyl, 1-ethyl-1-methyl-2-propenyl, 1-ethyl-2-methyl-1-propenyl and 1-ethyl-2-methyl-2-propenyl;
[0558] C₃-C₆-cycloalkenyl: 1-cyclopropenyl, 2-cyclopropenyl, 1-cyclobutenyl, 2-cyclobutenyl, 1-cyclopentenyl, 2-cyclopentenyl, 1,3-cyclopentadienyl, 1,4-cyclopentadienyl, 2,4-cyclopentadienyl, 1-cyclohexenyl, 2-cyclohexenyl, 3-cyclohexenyl, 1,3-cyclohexadienyl, 1,4-cyclohexadienyl, 2,5-cyclohexadienyl;
[0559] C₃-C₆-alkynyl: for example 1-propynyl, 2-propynyl, 1-butynyl, 2-butynyl, 3-butynyl, 1-methyl-2-propynyl, 1-pentynyl, 2-pentynyl, 3-pentynyl, 4-pentynyl, 1-methyl-2-butynyl, 1-methyl-3-butynyl, 2-methyl-3-butynyl, 3-methyl-1-butynyl, 1,1-dimethyl-2-propynyl, 1-ethyl-2-propynyl, 1-hexynyl, 2-hexynyl, 3-hexynyl, 4-hexynyl, 5-hexynyl, 1-methyl-2-pentynyl, 1-methyl-3-pentynyl, 1-methyl-4-pentynyl, 2-methyl-3-pentynyl, 2-methyl-4-pentynyl, 3-methyl-1-pentynyl, 3-methyl-4-pentynyl, 4-methyl-1-pentynyl, 4-methyl-2-pentynyl, 1,1-dimethyl-2-butynyl, 1,1-dimethyl-3-butynyl, 1,2-dimethyl-3-butynyl, 2,2-dimethyl-3-butynyl, 3,3-dimethyl-1-butynyl, 1-ethyl-2-butynyl, 1-ethyl-3-butynyl, 2-ethyl-3-butynyl and 1-ethyl-1-methyl-2-propynyl;
[0560] C₁-C₄-alkoxy: for example methoxy, ethoxy, propoxy, 1-methylethoxy butoxy, 1-methylpropoxy, 2-methylpropoxy and 1,1-dimethylethoxy;
[0561] C₁-C₆-alkoxy and also the C₁-C₆-alkoxy moieties of (C₁-C₆-alkoxy)carbonyl, C₁-C₆-alkoxy-C₁-C₆-alkyl: C₁-C₄-alkoxy as mentioned above, and also, for example, pentoxy, 1-methylbutoxy, 2-methylbutoxy, 3-methoxylbutoxy, 1,1-dimethylpropoxy, 1,2-dimethylpropoxy, 2,2-dimethylpropoxy, 1-ethylpropoxy, hexoxy, 1-methylpentoxy, 2-methylpentoxy, 3-methylpentoxy, 4-methylpentoxy, 1,1-dimethylbutoxy, 1,2-dimethylbutoxy, 1,3-dimethylbutoxy, 2,2-dimethylbutoxy, 2,3-dimethylbutoxy, 3,3-dimethylbutoxy, 1-ethylbutoxy, 2-ethylbutoxy, 1,1,2-trimethylpropoxy, 1,2,2-trimethylpropoxy, 1-ethyl-1-methylpropoxy and 1-ethyl-2-methylpropoxy.
[0562] C₁-C₄-alkylthio: for example methylthio, ethylthio, propylthio, 1-methylethylthio, butylthio, 1-methylpropylthio, 2-methylpropylthio and 1,1-dimethylethylthio;
[0563] C₁-C₆-alkylthio: C₁-C₄-alkylthio as mentioned above, and also, for example, pentylthio, 1-methylbutylthio, 2-methylbutylthio, 3-methylbutylthio, 2,2-dimethylpropylthio, 1-ethylpropylthio, hexylthio, 1,1-dimethylpropylthio, 1,2-dimethylpropylthio, 1-methylpentylthio, 2-methylpentylthio, 3-methylpentylthio, 4-methylpentylthio, 1,1-dimethylbutylthio, 1,2-dimethylbutylthio, 1,3-dimethylbutylthio, 2,2-dimethylbutylthio, 2,3-dimethylbutylthio, 3,3-dimethylbutylthio, 1-ethylbutylthio, 2-ethylbutylthio, 1,1,2-trimethylpropylthio, 1,2,2-trimethylpropylthio, 1-ethyl-1-methylpropylthio and 1-ethyl-2-methylpropylthio;
[0564] C₁-C₆-alkylsulfinyl (C₁-C₆-alkyl-S(═O)—): z.B. methylsulfinyl, ethylsulfinyl, propylsulfinyl, 1-methylethylsulfinyl, butylsulfinyl, 1-methylpropylsulfinyl, 2-methylpropylsulfinyl, 1,1-di-methylethylsulfinyl, pentylsulfinyl, 1-methylbutylsulfinyl, 2-methylbutylsulfinyl, 3-methylbutylsulfinyl, 2,2-dimethylpropylsulfinyl, 1-ethylpropylsulfinyl, 1,1-dimethylpropylsulfinyl, 1,2-dimethylpropylsulfinyl, hexylsulfinyl, 1-methylpentylsulfinyl, 2-methylpentylsulfinyl, 3-methylpentylsulfinyl, 4-methylpentyl-sulfinyl, 1,1-dimethylbutyl-sulfinyl, 1,2-dimethylbutylsulfinyl, 1,3-dimethylbutyl-sulfinyl, 2,2-dimethylbutylsulfinyl, 2,3-dimethylbutylsulfinyl, 3,3-dimethylbutyl-sulfinyl, 1-ethylbutylsulfinyl, 2-ethylbutylsulfinyl, 1,1,2-trimethylpropylsulfinyl, 1,2,2-trimethylpropylsulfinyl, 1-ethyl-1-methylpropylsulfinyl and 1-ethyl-2-methylpropylsulfinyl;
[0565] C₁-C₆-alkylsulfonyl (C₁-C₆-alkyl-S(O)₂—): for example methylsulfonyl, ethylsulfonyl, propylsulfonyl, 1-methylethylsulfonyl, butylsulfonyl, 1-methylpropylsulfonyl, 2-methylpropylsulfonyl, 1,1-dimethylethylsulfonyl, pentylsulfonyl, 1-methylbutylsulfonyl, 2-methylbutylsulfonyl, 3-methylbutylsulfonyl, 1,1-dimethylpropylsulfonyl, 1,2-dimethylpropylsulfonyl, 2,2-di methyl propylsulfonyl, 1-ethylpropylsulfonyl, hexylsulfonyl, 1-methyl pentylsulfonyl, 2-methyl pentylsulfonyl, 3-methyl pentylsulfonyl, 4-methylpentylsulfonyl, 1,1-dimethylbutylsulfonyl, 1,2-dimethylbutylsulfonyl, 1,3-dimethylbutylsulfonyl, 2,2-dimethylbutylsulfonyl, 2,3-dimethylbutylsulfonyl, 3,3-dimethylbutylsulfonyl, 1-ethylbutylsulfonyl, 2-ethylbutylsulfonyl, 1,1,2-trimethyl-propylsulfonyl, 1,2,2-trimethylpropylsulfonyl, 1-ethyl-1-methylpropylsulfonyl and 1-ethyl-2-methylpropylsulfonyl;
[0566] (C₁-C₄-alkyl)amino: for example methylamino, ethylamino, propylamino, 1-methylethyl-amino, butylamino, 1-methylpropylamino, 2-methylpropylamino or 1,1-dimethylethylamino;
[0567] (C₁-C₆-alkyl)amino: (C₁-C₄-alkylamino) as mentioned above, and also, for example, pentylamino, 1-methylbutylamino, 2-methylbutylamino, 3-methylbutylamino, 2,2-dimethylpropylamino, 1-ethylpropylamino, hexylamino, 1,1-dimethylpropylamino, 1,2-dimethylpropylamino, 1-methylpentylamino, 2-methylpentylamino, 3-methylpentylamino, 4-methylpentylamino, 1,1-dimethylbutylamino, 1,2-dimethylbutylamino, 1,3-dimethylbutylamino, 2,2-dimethylbutylamino, 2,3-dimethylbutyl-amino 3,3-dimethylbutyl-amino, 1-ethylbutylamino, 2-ethylbutylamino, 1,1,2-trimethylpropylamino, 1,2,2-trimethylpropylamino, 1-ethyl-1-methylpropylamino or 1-ethyl-2-methylpropylamino;
[0568] di(C₁-C₄-alkyl)amino: for example N,N-dimethylamino, N,N-diethylamino, N,N-di(1-methylethyl)amino, N,N-dipropylamino, N,N-dibutylamino, N,N-di(1-methylpropyl)amino, N,N-di(2-methylpropyl)amino, N,N-di(1,1-dimethylethyl)amino, N-ethyl-N-methylamino, N-methyl-N-propylamino, N-methyl-N-(1-methylethyl)amino, N-butyl-N-methylamino, N-methyl-N-(1-methylpropyl)amino, N-methyl-N-(2-methylpropyl)amino, N-(1,1-dimethylethyl)-N-methylamino, N-ethyl-N-propylamino, N-ethyl-N-(1-methylethyl)amino, N-butyl-N-ethylamino, N-ethyl-N-(1-methylpropyl)amino, N-ethyl-N-(2-methylpropyl)amino, N-ethyl-N-(1,1-dimethylethyl)amino, N-(1-methylethyl)-N-propylamino, N-butyl-N-propylamino, N-(1-methylpropyl)-N-propylamino, N-(2-methylpropyl)-N-propylamino, N-(1,1-dimethylethyl)-N-propylamino, N-butyl-N-(1-methylethyl)amino, N-(1-methylethyl)-N-(1-methylpropyl)amino, N-(1-methylethyl)-N-(2-methylpropyl)amino, N-(1,1-dimethylethyl)-N-(1-methylethyl)amino, N-butyl-N-(1-methylpropyl)amino, N-butyl-N-(2-methylpropyl)amino, N-butyl-N-(1,1-dimethylethyl)amino, N-(1-methylpropyl)-N-(2-methylpropyl)amino, N-(1,1-dimethylethyl)-N-(1-methylpropyl)amino or N-(1,1-dimethylethyl)-N-(2-methylpropyl)amino;
[0569] di(C₁-C₆-alkyl)amino: di(C₁-C₄-alkyl)amino as mentioned above, and also, for example, N-methyl-N-pentylamino, N-methyl-N-(1-methylbutyl)amino, N-methyl-N-(2-methylbutyl)amino, N-methyl-N-(3-methylbutyl)amino, N-methyl-N-(2,2-dimethylpropyl)amino, N-methyl-N-(1-ethylpropyl)amino, N-methyl-N-hexylamino, N-methyl-N-(1,1-dimethylpropyl)amino, N-methyl-N-(1,2-dimethylpropyl)amino, N-methyl-N-(1-methylpentyl)amino, N-methyl-N-(2-methylpentyl)amino, N-methyl-N-(3-methylpentyl)amino, N-methyl-N-(4-methylpentyl)amino, N-methyl-N-(1,1-dimethylbutyl)amino, N-methyl-N-(1,2-dimethylbutyl)amino, N-methyl-N-(1,3-dimethylbutyl)amino, N-methyl-N-(2,2-dimethyl-butyl)amino, N-methyl-N-(2,3-dimethylbutyl)amino, N-methyl-N-(3,3-dimethylbutyl)amino, N-methyl-N-(1-ethylbutyl)amino, N-methyl-N-(2-ethylbutyl)amino, N-methyl-N-(1,1,2-trimethylpropyl)amino, N-methyl-N-(1,2,2-trimethylpropyl)amino, N-methyl-N-(1-ethyl-1-methylpropyl)amino, N-methyl-N-(1-ethyl-2-methylpropyl)amino, N-ethyl-N-pentylamino, N-ethyl-N-(1-methylbutyl)amino, N-ethyl-N-(2-methylbutyl)amino, N-ethyl-N-(3-methylbutyl)amino, N-ethyl-N-(2,2-dimethylpropyl)amino, N-ethyl-N-(1-ethylpropyl)amino, N-ethyl-N-hexylamino, N-ethyl-N-(1,1-dimethylpropyl)amino, N-ethyl-N-(1,2-dimethylpropyl)-amino, N-ethyl-N-(1-methylpentyl)amino, N-ethyl-N-(2-methylpentyl)amino, N-ethyl-N-(3-methylpentyl)amino, N-ethyl-N-(4-methylpentyl)amino, N-ethyl-N-(1,1-dimethylbutyl)amino, N-ethyl-N-(1,2-dimethylbutyl)amino, N-ethyl-N-(1,3-dimethylbutyl)amino, N-ethyl-N-(2,2-dimethylbutyl)amino, N-ethyl-N-(2,3-dimethylbutyl)amino, N-ethyl-N-(3,3-dimethylbutyl)amino, N-ethyl-N-(1-ethylbutyl)amino, N-ethyl-N-(2-ethylbutyl)amino, N-ethyl-N-(1,1,2-trimethylpropyl)amino, N-ethyl-N-(1,2,2-trimethylpropyl)amino, N-ethyl-N-(1-ethyl-1-methylpropyl)amino, N-ethyl-N-(1-ethyl-2-methylpropyl)amino, N-propyl-N-pentylamino, N-butyl-N-pentylamino, N,N-dipentylamino, N-propyl-N-hexylamino, N-butyl-N-hexylamino, N-pentyl-N-hexylamino or N,N-dihexylamino;
[0570] three- to six-membered heterocyclyl: monocyclic saturated or partially unsaturated hydrocarbon having three to six ring members as mentioned above which, in addition to carbon atoms, contains one or two heteroatoms selected from O, S and N;

[0571] for example 2-oxiranyl, 2-oxetanyl, 3-oxetanyl, 2-aziridinyl, 3-thietanyl, 1-azetidinyl, 2-azetidinyl,

[0572] for example 2-tetrahydrofuranyl, 3-tetrahydrofuranyl, 2-tetrahydrothienyl, 3-tetrahydrothienyl, 2-pyrrolidinyl, 3-pyrrolidinyl, 3-isoxazolidinyl, 4-isoxazolidinyl, 5-isoxazolidinyl, 3-isothiazolidinyl, 4-isothiazolidinyl, 5-isothiazolidinyl, 3-pyrazolidinyl, 4-pyrazolidinyl, 5-pyrazolidinyl, 2-oxazolidinyl, 4-oxazolidinyl, 5-oxazolidinyl, 2-thiazolidinyl, 4-thiazolidinyl, 5-thiazolidinyl, 2-imidazolidinyl, 4-imidazolidinyl;

[0573] for example 2,3-dihydrofur-2-yl, 2,3-dihydrofur-3-yl, 2,4-dihydrofur-2-yl, 2,4-dihydrofur-3-yl, 2,3-dihydrothien-2-yl, 2,3-dihydrothien-3-yl, 2,4-dihydrothien-2-yl, 2,4-dihydrothien-3-yl, 4,5-dihydropyrrol-2-yl, 4,5-dihydropyrrol-3-yl, 2,5-dihydropyrrol-2-yl, 2,5-dihydropyrrol-3-yl, 4,5-dihydroisoxazol-3-yl, 2,5-dihydroisoxazol-3-yl, 2,3-dihydroisoxazol-3-yl, 4,5-dihydroisoxazol-4-yl, 2,5-dihydroisoxazol-4-yl, 2,3-dihydroisoxazol-4-yl, 4,5-dihydroisoxazol-5-yl, 2,5-dihydroisoxazol-5-yl, 2,3-dihydroisoxazol-5-yl, 4,5-dihydroisothiazol-3-yl, 2,5-dihydroisothiazol-3-yl, 2,3-dihydroisothiazol-3-yl, 4,5-dihydroisothiazol-4-yl, 2,5-dihydroisothiazol-4-yl, 2,3-dihydroisothiazol-4-yl, 4,5-dihydroisothiazol-5-yl, 2,5-dihydroisothiazol-5-yl, 2,3-dihydroisothiazol-5-yl, 2,3-dihydropyrazol-2-yl, 2,3-dihydropyrazol-3-yl, 2,3-dihydropyrazol-4-yl, 2,3-dihydropyrazol-5-yl, 3,4-dihydropyrazol-3-yl, 3,4-dihydropyrazol-4-yl, 3,4-dihydropyrazol-5-yl, 4,5-dihydropyrazol-3-yl, 4,5-dihydropyrazol-4-yl, 4,5-dihydropyrazol-5-yl, 2,3-dihydroimidazol-2-yl, 2,3-dihydroimidazol-3-yl, 2,3-dihydroimidazol-4-yl, 2,3-dihydroimidazol-5-yl, 4,5-dihydroimidazol-2-yl, 4,5-dihydroimidazol-4-yl, 4,5-dihydroimidazol-5-yl, 2,5-dihydroimidazol-2-yl, 2,5-dihydroimidazol-4-yl, 2,5-dihydroimidazol-5-yl, 2,3-dihydrooxazol-3-yl, 2,3-dihydrooxazol-4-yl, 2,3-dihydrooxazol-5-yl, 3,4-dihydrooxazol-3-yl, 3,4-dihydrooxazol-4-yl, 3,4-dihydrooxazol-5-yl, 2,3-dihydrothiazol-3-yl, 2,3-dihydrothiazol-4-yl, 2,3-dihydrothiazol-5-yl, 3,4-dihydrothiazol-3-yl, 3,4-dihydrothiazol-4-yl, 3,4-dihydrothiazol-5-yl, 3,4-dihydrothiazol-2-yl, 3,4-dihydrothiazol-3-yl, 3,4-dihydrothiazol-4-yl;

[0574] for example 2-piperidinyl, 3-piperidinyl, 4-piperidinyl, 1,3-dioxan-2-yl, 1,3-dioxan-4-yl, 1,3-dioxan-5-yl, 1,4-dioxan-2-yl, 1,3-dithian-2-yl, 1,3-dithian-4-yl, 1,4-dithian-2-yl, 1,3-dithian-5-yl, 2-tetrahydropyranyl, 3-tetrahydropyranyl, 4-tetrahydropyranyl, 2-tetrahydrothiopyranyl, 3-tetrahydrothiopyranyl, 4-tetrahydro-thiopyranyl, 3-hexahydropyridazinyl, 4-hexahydropyridazinyl, 2-hexahydropyrimidinyl, 4-hexahydropyrimidinyl, 5-hexahydropyrimidinyl, 2-piperazinyl, tetrahydro-1,3-oxazin-2-yl, tetrahydro-1,3-oxazin-6-yl, 2-morpholinyl, 3-morpholinyl;

[0575] for example 2H-pyran-2-yl, 2H-pyran-3-yl, 2H-pyran-4-yl, 2H-pyran-5-yl, 2H-pyran-6-yl, 3,6-dihydro-2H-pyran-2-yl, 3,6-dihydro-2H-pyran-3-yl, 3,6-dihydro-2H-pyran-4-yl, 3,6-dihydro-2H-pyran-5-yl, 3,6-dihydro-2H-pyran-6-yl, 3,4-dihydro-2H-pyran-3-yl, 3,4-dihydro-2H-pyran-4-yl, 3,4-dihydro-2H-pyran-6-yl, 2H-thiopyran-2-yl, 2H-thiopyran-3-yl, 2H-thiopyran-4-yl, 2H-thiopyran-5-yl, 2H-thiopyran-6-yl, 5,6-dihydro-4H-1,3-oxazin-2-yl;

[0576] The preferred embodiments of the invention mentioned herein below have to be understood as being preferred either independently from each other or in combination with one another.

[0577] According to a preferred embodiment of the invention preference is also given to those azines of formula (I), wherein the variables, either independently of one another or in combination with one another, have the following meanings:

[0578] Preferred are the azines of formula (I), wherein
[0579] A is phenyl, which is substituted by two to five substituents selected from the group consisting of halogen, CN, NO₂, C₁-C₆-alkyl, C₁-C₆-haloalkyl, OH, C₁-C₆-alkoxy, C₁-C₆-alkylthio, (C₁-C₆-alkyl)sulfinyl, (C₁-C₆-alkyl)sulfonyl, amino, (C₁-C₆-alkyl)amino, di(C₁-C₆-alkyl)amino, (C₁-C₆-alkyl)carbonyl, (C₁-C₆-alkoxy)carbonyl;
   [0580] particularly preferred phenyl, which is substituted by two to five substituents selected from the group consisting of halogen, CN, C₁-C₆-alkyl and C₁-C₆-alkoxy;
      [0581] particularly preferred selected from halogen and CN;
      [0582] also particularly preferred selected from the group consisting of F, Cl, CN and CH₃;
      [0583] especially preferred selected from the group consisting of F, Cl and CN;
   [0584] especially preferred phenyl, which is substituted by two to four substituents selected from the group consisting of halogen, CN, NO₂, C₁-C₆-alkyl, C₁-C₆-haloalkyl, OH, C₁-C₆-alkoxy, C₁-C₆-alkylthio, (C₁-C₆-alkyl)sulfinyl, (C₁-C₆-alkyl)sulfonyl, amino, (C₁-C₆-alkyl)amino, di(C₁-C₆-alkyl)amino, (C₁-C₆-alkyl)-carbonyl, (C₁-C₆-alkoxy)carbonyl;
      [0585] particularly preferred selected from the group consisting of halogen, CN, C₁-C₆-alkyl and C₁-C₆-alkoxy;
      [0586] especially preferred selected from halogen and CN;
      [0587] also especially preferred selected from the group consisting of F, Cl, CN and CH₃;
      [0588] more preferred selected from the group consisting of F, Cl and CN;
   [0589] more preferred phenyl, which is substituted by two substituents selected from the group consisting of halogen, CN, NO₂, C₁-C₆-alkyl, C₁-C₆-haloalkyl, OH, C₁-C₆-alkoxy, C₁-C₆-alkylthio, (C₁-C₆-alkyl)sulfinyl, (C₁-C₆-alkyl)sulfonyl, amino, (C₁-C₆-alkyl)amino, di(C₁-C₆-alkyl)amino, (C₁-C₆-alkyl)-carbonyl, (C₁-C₆-alkoxy)carbonyl;
      [0590] particularly preferred selected from the group consisting of halogen, CN, C₁-C₆-alkyl and C₁-C₆-alkoxy;
      [0591] especially preferred selected from halogen and CN;
      [0592] also especially preferred selected from the group consisting of F, Cl, CN and CH₃;
      [0593] more preferred selected from the group consisting of F, Cl and CN;
   [0594] also more preferred phenyl, which is substituted by three substituents selected from the group consisting of halogen, CN, NO₂, C₁-C₆-alkyl, C₁-C₆-haloalkyl, OH, C₁-C₆-alkoxy, C₁-C₆-alkylthio, (C₁-C₆-alkyl)sulfinyl, (C₁-C₆-alkyl)sulfonyl, amino, (C₁-C₆-alkyl)amino, di(C₁-C₆-alkyl)amino, (C₁-C₆-alkyl)-carbonyl, (C₁-C₆-alkoxy)carbonyl;
      [0595] particularly preferred selected from the group consisting of halogen, CN, C₁-C₆-alkyl and C₁-C₆-alkoxy;
      [0596] especially preferred selected from halogen and CN;
      [0597] also especially preferred selected from the group consisting of F, Cl, CN and CH₃;
      [0598] more preferred selected from the group consisting of F, Cl and CN;
   [0599] also more preferred phenyl, which is substituted by four substituents selected from the group consisting of halogen, CN, NO₂, C₁-C₆-alkyl, C₁-C₆-haloalkyl, OH, C₁-C₆-alkoxy, C₁-C₆-alkylthio, (C₁-C₆-alkyl)sulfinyl, (C₁-C₆-alkyl)sulfonyl, amino, (C₁-C₆-alkyl)amino, di(C₁-C₆-alkyl)amino, (C₁-C₆-alkyl)-carbonyl, (C₁-C₆-alkoxy)carbonyl;
      [0600] particularly preferred selected from the group consisting of halogen, CN, C₁-C₆-alkyl and C₁-C₆-alkoxy;
      [0601] especially preferred selected from halogen and CN;
      [0602] also especially preferred selected from the group consisting of F, Cl, CN and CH₃;
      [0603] more preferred selected from the group consisting of F, Cl and CN.

[0604] Also preferred are the azines of formula (I), wherein

[0605] A is

[chemical structure]

[0606] wherein
[0607] R^{a} and R^{e} independently of one another are halogen, CN, NO₂, C₁-C₆-alkyl, C₁-C₆-haloalkyl, OH, C₁-C₆-alkoxy, C₁-C₆-alkylthio, (C₁-C₆-alkyl)sulfinyl, (C₁-C₆-alkyl)sulfonyl, amino, (C₁-C₆-alkyl)amino, di(C₁-C₆-alkyl)amino, (C₁-C₆-alkyl)-carbonyl, (C₁-C₆-alkoxy)carbonyl; and
[0608] R^{b}, R^{c} and R^{d} independently of one another are hydrogen, halogen, CN, NO₂, C₁-C₆-alkyl, C₁-C₆-haloalkyl, OH, C₁-C₆-alkoxy, C₁-C₆-alkylthio, (C₁-C₆-alkyl)sulfinyl, (C₁-C₆-alkyl)sulfonyl, amino, (C₁-C₆-alkyl)amino, di(C₁-C₆-alkyl)amino, (C₁-C₆-alkyl)carbonyl, (C₁-C₆-alkoxy)carbonyl;
[0609] particularly preferred R^{a} and R^{e} independently of one another are halogen, CN, C₁-C₆-alkyl or C₁-C₆-alkoxy; and
   [0610] R^{b}, R^{c} and R^{d} independently of one another are hydrogen, halogen, CN, NO₂, C₁-C₆-alkyl, C₁-C₆-haloalkyl or C₁-C₆-alkoxy;
[0611] especially preferred R^{a} and R^{e} independently of one another are halogen or CN; and
   [0612] R^{b}, R^{c} and R^{d} independently of one another are hydrogen, halogen, CN, C₁-C₆-alkyl or C₁-C₆-alkoxy;
[0613] more preferred R^{a} and R^{e} are halogen; and
   [0614] R^{b}, R^{c} and R^{d} independently of one another are hydrogen, halogen or CN;
[0615] most preferred R^{a} and R^{e} are halogen; and
   [0616] R^{b}, R^{c} and R^{d} are hydrogen;
[0617] also most preferred R^{a}, R^{b}, R^{d} and R^{e} are halogen; and
   [0618] R^{c} hydrogen;
[0619] also most preferred R^{a}, R^{b}, R^{c}, R^{d} and R^{e} are halogen.

[0620] Also preferred are the azines of formula (I), wherein

[0621] A is

[chemical structure]

[0622] wherein R^{a} is halogen or CN;
   [0623] R^{b} and R^{d} are H, halogen or CN;
   [0624] R^{c} is H or halogen;
   [0625] R^{e} is halogen, CN or C₁-C₆-alkyl;
[0626] particularly preferred R^{a} is halogen;
   [0627] R^{b}, R^{c} and R^{d} are H or halogen; and
   [0628] R^{e} is halogen or CN;
[0629] especially preferred R^{a}, R^{b}, R^{d} and R^{e} are halogen; and
   [0630] R^{c} is H or halogen;
[0631] more preferred R^{a}, R^{b}, R^{d} and R^{e} are F; and
   [0632] R^{c} is H or F.

[0633] Especially preferred are the azines of formula (I), wherein A is selected from the group consisting of (A.1.1), (A.1.2) and (A.1.3);

[0634] more preferred selected from the group consisting of (A.1.2) and (A.1.3);

[chemical structure]

[0635] wherein
[0636] R^{a} and R^{e} independently of one another are halogen, CN, NO₂, C₁-C₆-alkyl, C₁-C₆-haloalkyl, OH, C₁-C₆-alkoxy, C₁-C₆-alkylthio, (C₁-C₆-alkyl)sulfinyl, (C₁-C₆-alkyl)sulfonyl, amino, (C₁-C₆-alkyl)amino, di(C₁-C₆-alkyl)amino, (C₁-C₆-alkyl)-carbonyl, (C₁-C₆-alkoxy)carbonyl; and
[0637] R^{b} and R^{d} independently of one another are halogen, CN, NO₂, C₁-C₆-alkyl, C₁-C₆-haloalkyl, OH, C₁-C₆-alkoxy, C₁-C₆-alkylthio, (C₁-C₆-alkyl)sulfinyl, (C₁-C₆-alkyl)sulfonyl, amino, (C₁-C₆-alkyl)amino, di(C₁-C₆-alkyl)amino, (C₁-C₆-alkyl)-carbonyl, (C₁-C₆-alkoxy)carbonyl;
[0638] particularly preferred R^{a} and R^{e} independently of one another are halogen, CN, C₁-C₆-alkyl or C₁-C₆-alkoxy; and
   [0639] R^{b} and R^{d} independently of one another are halogen, CN, NO₂, C₁-C₆-alkyl, C₁-C₆-haloalkyl or C₁-C₆-alkoxy;
[0640] especially preferred R^{a} and R^{e} independently of one another halogen or CN; and
   [0641] R^{b} and R^{d} independently of one another are halogen, CN, C₁-C₆-alkyl or C₁-C₆-alkoxy;
[0642] more preferred R^{a} and R^{e} are halogen; and
   [0643] R^{b} and R^{d} independently of one another are halogen or CN;
[0644] most preferred R^{a}, R^{b}, R^{d} and R^{e} are halogen.

[0645] Also especially preferred are the azines of formula (I), wherein

[0646] A is

[chemical structure]

[0647] wherein R^{a}, R^{b}, R^{d} and R^{e} have the meanings, in particular the preferred meanings, as defined above.

[0648] Also especially preferred are the azines of formula (I), wherein

[0649] A is

[chemical structure]

[0650] wherein R^{a}, R^{b} and R^{e} have the meanings, in particular the preferred meanings, as defined above.

[0651] Also especially preferred are the azines of formula (I), wherein

[0652] A is

[chemical structure]

[0653] wherein R^{a} and R^{e} have the meanings, in particular the preferred meanings, as defined above.

[0654] Also preferred are the azines of formula (I), wherein
[0655] A is 2-fluoro-phenyl, which is substituted by one to four substituents selected from the group consisting of halogen, CN, NO₂, C₁-C₆-alkyl, C₁-C₆-haloalkyl, OH, C₁-C₆-alkoxy, C₁-C₆-alkylthio, (C₁-C₆-alkyl)sulfinyl, (C₁-C₆-alkyl)sulfonyl, amino, (C₁-C₆-alkyl)amino, di(C₁-C₆-alkyl)amino, (C₁-C₆-alkyl)carbonyl and (C₁-C₆-alkoxy)carbonyl;
   [0656] particularly preferrd 2-fluoro-phenyl, which is substituted by one to four substituents selected from the group consisting of halogen, CN, C₁-C₆-alkyl and C₁-C₆-alkoxy;
      [0657] particularly preferred selected from halogen and CN;
      [0658] also particularly preferred selected from the group consisting of F, Cl, CN and CH₃;
      [0659] especially preferred selected from the group consisting of F, Cl and CN;
   [0660] especially preferred 2-fluoro-phenyl, which is substituted by one to three substituents selected from the group consisting of halogen, CN, NO₂, C₁-C₆-alkyl, C₁-C₆-haloalkyl, OH, C₁-C₆-alkoxy, C₁-C₆-alkylthio, (C₁-C₆-alkyl)sulfinyl, (C₁-C₆-alkyl)sulfonyl, amino, (C₁-C₆-alkyl)amino, di(C₁-C₆-alkyl)amino, (C₁-C₆-alkyl)-carbonyl and (C₁-C₆-alkoxy)carbonyl;
      [0661] particularly preferred selected from the group consisting of halogen, CN, C₁-C₆-alkyl and C₁-C₆-alkoxy;
      [0662] especially preferred selected from halogen and CN;
      [0663] also especially preferred selected from the group consisting of F, Cl, CN and CH₃;
      [0664] more preferred selected from the group consisting of F, Cl and CN;
   [0665] more preferred 2-fluoro-phenyl, which is substituted by one substituent selected from the group consisting of halogen, CN, NO₂, C₁-C₆-alkyl, C₁-C₆-haloalkyl, OH, C₁-C₆-alkoxy, C₁-C₆-alkylthio, (C₁-C₆-alkyl)sulfinyl, (C₁-C₆-alkyl)sulfonyl, amino, (C₁-C₆-alkyl)amino, di(C₁-C₆-alkyl)amino, (C₁-C₆-alkyl)-carbonyl and (C₁-C₆-alkoxy)carbonyl;
      [0666] particularly preferred selected from the group consisting of halogen, CN, C₁-C₆-alkyl and C₁-C₆-alkoxy;
      [0667] especially preferred selected from halogen and CN;
      [0668] also especially preferred selected from the group consisting of F, Cl, CN and CH₃;
      [0669] more preferred selected from the group consisting of F, Cl and CN;
   [0670] also more preferred 2-fluoro-phenyl, which is substituted by two substituents selected from the group consisting of halogen, CN, NO₂, C₁-C₆-alkyl, C₁-C₆-haloalkyl, OH, C₁-C₆-alkoxy, C₁-C₆-alkylthio, (C₁-C₆-alkyl)sulfinyl, (C₁-C₆-alkyl)sulfonyl, amino, (C₁-C₆-alkyl)amino, di(C₁-C₆-alkyl)amino, (C₁-C₆-alkyl)-carbonyl and (C₁-C₆-alkoxy)carbonyl;
      [0671] particularly preferred selected from the group consisting of halogen, CN, C₁-C₆-alkyl and C₁-C₆-alkoxy;
      [0672] especially preferred selected from halogen and CN;
      [0673] also especially preferred selected from the group consisting of F, Cl, CN and CH₃;
      [0674] more preferred selected from the group consisting of F, Cl and CN;
   [0675] also more preferred 2-fluoro-phenyl, which is substituted by three substituents selected from the group consisting of halogen, CN, NO₂, C₁-C₆-alkyl, C₁-C₆-haloalkyl, OH, C₁-C₆-alkoxy, C₁-C₆-alkylthio, (C₁-C₆-alkyl)sulfinyl, (C₁-C₆-alkyl)sulfonyl, amino, (C₁-C₆-alkyl)amino, di(C₁-C₆-alkyl)amino, (C₁-C₆-alkyl)-carbonyl and (C₁-C₆-alkoxy)carbonyl;
      [0676] particularly preferred selected from the group consisting of halogen, CN, C₁-C₆-alkyl and C₁-C₆-alkoxy;
      [0677] especially preferred selected from halogen and CN;
      [0678] also especially preferred selected from the group consisting of F, Cl, CN and CH₃;
      [0679] more preferred selected from the group consisting of F, Cl and CN.

[0680] Also preferred are the azines of formula (I), wherein

[0681] A is

[chemical structure]

[0682] wherein
[0683] R^{a} is halogen, CN, NO₂, C₁-C₆-alkyl, C₁-C₆-haloalkyl, OH, C₁-C₆-alkoxy, C₁-C₆-alkylthio, (C₁-C₆-alkyl)sulfinyl, (C₁-C₆-alkyl)sulfonyl, amino, (C₁-C₆-alkyl)amino, di(C₁-C₆-alkyl)amino, (C₁-C₆-alkyl)carbonyl, (C₁-C₆-alkoxy)carbonyl; and
[0684] R^{b}, R^{c} and R^{d} independently of one another are hydrogen, halogen, CN, NO₂, C₁-C₆-alkyl, C₁-C₆-haloalkyl, OH, C₁-C₆-alkoxy, C₁-C₆-alkylthio, (C₁-C₆-alkyl)sulfinyl, (C₁-C₆-alkyl)sulfonyl, amino, (C₁-C₆-alkyl)amino, di(C₁-C₆-alkyl)amino, (C₁-C₆-alkyl)carbonyl, (C₁-C₆-alkoxy)carbonyl;
[0685] particularly preferred R^{a} is halogen, CN, C₁-C₆-alkyl or C₁-C₆-alkoxy; and
   [0686] R^{b}, R^{c} and R^{d} independently of one another are hydrogen, halogen, CN, NO₂, C₁-C₆-alkyl, C₁-C₆-haloalkyl or C₁-C₆-alkoxy;
[0687] especially preferred R^{a} is halogen or CN; and
   [0688] R^{b}, R^{c} and R^{d} independently of one another are hydrogen, halogen, CN, C₁-C₆-alkyl or C₁-C₆-alkoxy;
[0689] more preferred R^{a} is halogen; and
   [0690] R^{b}, R^{c} and R^{d} independently of one another are hydrogen, halogen or CN;
[0691] most preferred R^{a} is halogen; and
   [0692] R^{b}, R^{c} and R^{d} are hydrogen;
[0693] also most preferred R^{a}, R^{b} and R^{d} are halogen; and
   [0694] R^{c} is hydrogen;
[0695] also most preferred R^{a}, R^{b}, R^{c} and R^{d} are halogen.

[0696] Also preferred are the azines of formula (I), wherein

[0697] A is

[chemical structure]

[0698] wherein R^{a} is halogen, CN or C₁-C₆-alkyl;
   [0699] R^{b} and R^{d} are H, halogen or CN; and
   [0700] R^{c} is H or halogen;
[0701] particularly preferred R^{a} is halogen or CN; and
   [0702] R^{b}, R^{c} and R^{d} are H or halogen;
[0703] especially preferred R^{a}, R^{b} and R^{d} are halogen; and
   [0704] R^{c} is H or halogen;
[0705] Also especially preferred R^{a}, R^{b} and R^{d} are halogen; and
   [0706] R^{c} is H, F, Br or I;
[0707] more preferred R^{a}, R^{b} and R^{d} are F; and
   [0708] R^{c} is F, Br or I;
[0709] also more preferred R^{a}, R^{b} and R^{d} are F; and
   [0710] R^{c} is H or F.

[0711] Especially preferred are the azines of formula (I), wherein A is selected from the group consisting of (A.1a.1), (A.1a.2) and (A.1a.3);

[0712] more preferred selected from the group consisting of (A.1.2) and (A.1.3);

[chemical structure]

[0713] wherein
[0714] R^{a} is halogen, CN, NO₂, C₁-C₆-alkyl, C₁-C₆-haloalkyl, OH, C₁-C₆-alkoxy, C₁-C₆-alkylthio, (C₁-C₆-alkyl)sulfinyl, (C₁-C₆-alkyl)sulfonyl, amino, (C₁-C₆-alkyl)amino, di(C₁-C₆-alkyl)amino, (C₁-C₆-alkyl)carbonyl, (C₁-C₆-alkoxy)carbonyl; and
[0715] R^{b} and R^{d} independently of one another are halogen, CN, NO₂, C₁-C₆-alkyl, C₁-C₆-haloalkyl, OH, C₁-C₆-alkoxy, C₁-C₆-alkylthio, (C₁-C₆-alkyl)sulfinyl, (C₁-C₆-alkyl)sulfonyl, amino, (C₁-C₆-alkyl)amino, di(C₁-C₆-alkyl)amino, (C₁-C₆-alkyl)-carbonyl, (C₁-C₆-alkoxy)carbonyl;
[0716] particularly preferred R^{a} is halogen, CN, C₁-C₆-alkyl or C₁-C₆-alkoxy; and
   [0717] R^{b} and R^{d} independently of one another are halogen, CN, NO₂, C₁-C₆-alkyl, C₁-C₆-haloalkyl or C₁-C₆-alkoxy;
[0718] especially preferred R^{a} is halogen or CN; and
   [0719] R^{b} and R^{d} independently of one another are halogen, CN, C₁-C₆-alkyl or C₁-C₆-alkoxy;
[0720] more preferred R^{a} is halogen; and
   [0721] R^{b} and R^{d} independently of one another are halogen or CN;
[0722] most preferred R^{a}, R^{b} and R^{d} are halogen.

[0723] Also especially preferred are the azines of formula (I), wherein

[0724] A is

[chemical structure]

[0725] wherein R^{a}, R^{b} and R^{d} have the meanings, in particular the preferred meanings, as defined above.

[0726] Also especially preferred are the azines of formula (I), wherein

[0727] A is

[chemical structure]

[0728] wherein R^{a} and R^{b} have the meanings, in particular the preferred meanings, as defined above.

[0729] Also especially preferred are the azines of formula (I), wherein

[0730] A is

[chemical structure]

[0731] wherein R^{a} has the meanings, in particular the preferred meanings, as defined above.

[0732] Also preferred are the azines of formula (I), wherein
[0733] R¹ is H, CN, C₁-C₆-alkyl, C₁-C₆-haloalkyl, C₁-C₆-alkoxy-C₁-C₆-alkyl, C₁-C₆-alkoxy, (C₁-C₆-alkyl)carbonyl or (C₁-C₆-alkyl)sulfonyl;
   [0734] particularly preferred H, CN, C₁-C₆-alkyl, C₁-C₆-alkoxy-C₁-C₆-alkyl, C₁-C₆-alkoxy, (C₁-C₆-alkyl)carbonyl or (C₁-C₆-alkyl)sulfonyl;
   [0735] especially preferred H, CN, CH₃, CH₂OCH₃, OCH₃, COCH₃ or SO₂CH₃;
   [0736] more preferred hydrogen.

[0737] Also preferred are the azines of formula (I), wherein
[0738] R² is H, halogen, C₁-C₆-alkyl or C₁-C₆-haloalkyl;
   [0739] particularly preferred halogen, C₁-C₆-alkyl or C₁-C₆-haloalkyl;
   [0740] also particularly preferred H, F, Cl, CH₃ or CF₃.

[0741] Also preferred are the azines of formula (I), wherein
[0742] R³ and R⁴ are
   [0743] independently of one another H, halogen, C₁-C₆-alkyl or C₁-C₆-haloalkyl; or together with the carbon atom to which they are attached form a moiety selected from the group consisting of C₃-C₆-cycloalkyl, C₃-C₆-cycloalkenyl and three- to six-membered heterocyclyl,
      [0744] wherein the C₃-C₆-cycloalkyl, C₃-C₆-cycloalkenyl or the three- to six-membered heterocyclyl is unsubstituted or substituted by one to three substituents selected from halogen, CN, C₁-C₆-alkyl and C₁-C₆-alkoxy;
   [0745] independently of one another particularly preferred H, halogen, C₁-C₆-alkyl or C₁-C₆-haloalkyl; or
   [0746] together with the carbon atom to which they are attached form a moiety selected from the group consisting of C₃-C₆-cycloalkyl and C₃-C₆-cycloalkenyl,
      [0747] wherein the C₃-C₆-cycloalkyl or C₃-C₆-cycloalkenyl is unsubstituted or substituted by one to three substituents selected from halogen, CN, C₁-C₆-alkyl and C₁-C₆-alkoxy;
   [0748] independently of one another especially preferred H, halogen, C₁-C₆-alkyl or C₁-C₆-haloalkyl;
   [0749] independently of one another more preferred H, halogen or C₁-C₆-alkyl.

[0750] Also preferred are the azines of formula (I), wherein
[0751] R² is H, halogen, C₁-C₆-alkyl; and
[0752] R³ and R⁴ are independently of one another H, halogen, C₁-C₆-alkyl, or together with the carbon atom to which they are attached form a C₃-C₆-cycloalkyl;
[0753] particularly preferred R² is H, halogen or C₁-C₆-alkyl;
   [0754] R³ is C₁-C₆-alkyl;
   [0755] R⁴ is H, halogen or C₁-C₆-alkyl;
   [0756] R³ and R⁴ together with the carbon atom to which they are attached form a C₃-C₆-cycloalkyl;
[0757] especially preferred R² is halogen or C₁-C₆-alkyl;
   [0758] R³ is C₁-C₆-alkyl;
   [0759] R⁴ is H or C₁-C₆-alkyl;
[0760] more preferred R² is halogen; and
   [0761] R³ and R⁴ are C₁-C₆-alkyl.

[0762] Also preferred are the azines of formula (I), wherein
[0763] R⁵ is H, CN, C₁-C₆-alkyl, C₁-C₆-haloalkyl, C₁-C₆-alkoxy-C₁-C₆-alkyl, C₁-C₆-alkoxy, (C₁-C₆-alkyl)carbonyl or (C₁-C₆-alkyl)sulfonyl;
   [0764] particularly preferred H, CN, C₁-C₆-alkyl, C₁-C₆-alkoxy-C₁-C₆-alkyl, C₁-C₆-alkoxy, (C₁-C₆-alkyl)carbonyl or (C₁-C₆-alkyl)sulfonyl;
   [0765] especially preferred H, CN, CH₃, CH₂OCH₃, OCH₃, COCH₃ or SO₂CH₃;
   [0766] more preferred hydrogen.

[0767] Also preferred are the azines of formula (I), wherein
[0768] A is phenyl, which is substituted by two to five substituents
   [0769] selected from the group consisting of halogen, CN, C₁-C₆-alkyl and C₁-C₆-alkoxy;
   [0770] particularly preferred selected from halogen and CN;
   [0771] also particularly preferred selected from the group consisting of F, Cl, CN and CH₃;
   [0772] especially preferred selected from the group consisting of F, Cl and CN;
particularly preferred phenyl, which is substituted by two to four substituents selected from the group consisting of halogen, CN, NO₂, C₁-C₆-alkyl, C₁-C₆-haloalkyl, OH, C₁-C₆-alkoxy, C₁-C₆-alkylthio, (C₁-C₆-alkyl)sulfinyl, (C₁-C₆-alkyl)sulfonyl, amino, (C₁-C₆-alkyl)amino, di(C₁-C₆-alkyl)amino, (C₁-C₆-alkyl)-carbonyl, (C₁-C₆-alkoxy)carbonyl;
   [0773] particularly preferred selected from the group consisting of halogen, CN, C₁-C₆-alkyl and C₁-C₆-alkoxy;
   [0774] especially preferred selected from halogen and CN;
   [0775] also especially preferred selected from the group consisting of F, Cl, CN and CH₃;
   [0776] more preferred selected from the group consisting of F, Cl and CN;
especially preferred phenyl, which is substituted by two substituents selected from the group consisting of halogen, CN, NO₂, C₁-C₆-alkyl, C₁-C₆-haloalkyl, OH, C₁-C₆-alkoxy, C₁-C₆-alkylthio, (C₁-C₆-alkyl)sulfinyl, (C₁-C₆-alkyl)sulfonyl, amino, (C₁-C₆-alkyl)amino, di(C₁-C₆-alkyl)amino, (C₁-C₆-alkyl)-carbonyl, (C₁-C₆-alkoxy)carbonyl;
   [0777] particularly preferred selected from the group consisting of halogen, CN, C₁-C₆-alkyl and C₁-C₆-alkoxy;
   [0778] especially preferred selected from halogen and CN;
   [0779] also especially preferred selected from the group consisting of F, Cl, CN and CH₃;
   [0780] more preferred selected from the group consisting of F, Cl and CN;
also especially preferred phenyl, which is substituted by three substituents selected from the group consisting of halogen, CN, NO₂, C₁-C₆-alkyl, C₁-C₆-haloalkyl, OH, C₁-C₆-alkoxy, C₁-C₆-alkylthio, (C₁-C₆-alkyl)sulfinyl, (C₁-C₆-alkyl)sulfonyl, amino, (C₁-C₆-alkyl)amino, di(C₁-C₆-alkyl)amino, (C₁-C₆-alkyl)-carbonyl, (C₁-C₆-alkoxy)carbonyl;
   [0781] particularly preferred selected from the group consisting of halogen, CN, C₁-C₆-alkyl and C₁-C₆-alkoxy;
   [0782] especially preferred selected from halogen and CN;
   [0783] also especially preferred selected from the group consisting of F, Cl, CN and CH₃;
   [0784] more preferred selected from the group consisting of F, Cl and CN;
also specially preferred phenyl, which is substituted by four substituents selected from the group consisting of halogen, CN, NO₂, C₁-C₆-alkyl, C₁-C₆-haloalkyl, OH, C₁-C₆-alkoxy, C₁-C₆-alkylthio, (C₁-C₆-alkyl)sulfinyl, (C₁-C₆-alkyl)sulfonyl, amino, (C₁-C₆-alkyl)amino, di(C₁-C₆-alkyl)amino, (C₁-C₆-alkyl)-carbonyl, (C₁-C₆-alkoxy)carbonyl;
   [0785] particularly preferred selected from the group consisting of halogen, CN, C₁-C₆-alkyl and C₁-C₆-alkoxy;
   [0786] especially preferred selected from halogen and CN;
   [0787] also especially preferred selected from the group consisting of F, Cl, CN and CH₃;
   [0788] more preferred selected from the group consisting of F, Cl and CN;
[0789] R¹ is H, CN, C₁-C₆-alkyl, C₁-C₆-haloalkyl, C₁-C₆-alkoxy-C₁-C₆-alkyl, C₁-C₆-alkoxy, (C₁-C₆-alkyl)carbonyl or (C₁-C₆-alkyl)sulfonyl;
   [0790] particularly preferred H, CN, C₁-C₆-alkyl, C₁-C₆-alkoxy-C₁-C₆-alkyl, C₁-C₆-alkoxy, (C₁-C₆-alkyl)carbonyl or (C₁-C₆-alkyl)sulfonyl;
   [0791] especially preferred H, CN, CH₃, CH₂OCH₃, OCH₃, COCH₃ or SO₂CH₃;
   [0792] more preferred hydrogen.
[0793] R² is H, halogen, C₁-C₆-alkyl or C₁-C₆-haloalkyl;
   [0794] particularly preferred halogen, C₁-C₆-alkyl or C₁-C₆-haloalkyl;
   [0795] also particularly preferred H, F, CH₃ or CF₃;
[0796] R³ and R⁴ are independently of one another H, halogen, C₁-C₆-alkyl or C₁-C₆-haloalkyl; or together with the carbon atom to which they are attached form a moiety selected from the group consisting of C₃-C₆-cycloalkyl, C₃-C₆-cycloalkenyl and three- to six-membered heterocyclyl,
   [0797] wherein the C₃-C₆-cycloalkyl, C₃-C₆-cycloalkenyl or the three- to six-membered heterocyclyl is unsubstituted or substituted by one to three substituents selected from halogen, CN, C₁-C₆-alkyl and C₁-C₆-alkoxy;
   [0798] independently of one another particularly preferred H, halogen, C₁-C₆-alkyl or C₁-C₆-haloalkyl; or
   [0799] together with the carbon atom to which they are attached form a moiety selected from
   [0800] the group consisting of C₃-C₆-cycloalkyl and C₃-C₆-cycloalkenyl,
      [0801] wherein the C₃-C₆-cycloalkyl or C₃-C₆-cycloalkenyl is unsubstituted or substituted by one to three substituents selected from halogen, CN, C₁-C₆-alkyl and C₁-C₆-alkoxy;
   [0802] independently of one another especially preferred H, halogen, C₁-C₆-alkyl or C₁-C₆-haloalkyl;
   [0803] independently of one another more preferred H, halogen or C₁-C₆-alkyl; and
[0804] R⁵ is H, CN, C₁-C₆-alkyl, C₁-C₆-haloalkyl, C₁-C₆-alkoxy-C₁-C₆-alkyl, C₁-C₆-alkoxy, (C₁-C₆-alkyl)carbonyl or (C₁-C₆-alkyl)sulfonyl;
   [0805] particularly preferred H, CN, C₁-C₆-alkyl, C₁-C₆-alkoxy-C₁-C₆-alkyl, C₁-C₆-alkoxy, (C₁-C₆-alkyl)carbonyl or (C₁-C₆-alkyl)sulfonyl;
   [0806] especially preferred H, CN, CH₃, CH₂OCH₃, OCH₃, COCH₃ or SO₂CH₃;
   [0807] more preferred hydrogen.

[0808] Particular preference is given to azines of formula (I.a), which correspond to azines of formula (I) wherein A is (A.1) and R¹ and R⁵ are H:

[chemical structure]

[0809] wherein the variables R^{a}, R^{b}, R^{c}, R^{d}, R^{e}, R², R³ and R⁴ have the meanings, in particular the preferred meanings, as defined above;

[0810] special preference is given to the azines of the formulae (I.a.1) to (I.a.1406) of Table A, where the definitions of the variables R^{a}, R^{b}, R^{c}, R^{d}, R^{e}, R², R³ and R⁴ are of particular importance for the compounds according to the invention not only in combination with one another but in each case also on their own:

TABLE A

| No. | R^{a} | R^{b} | R^{c} | R^{d} | R^{e} | R² | R³ | R⁴ |
|---|---|---|---|---|---|---|---|---|
| I.a.1 | F | H | H | H | F | CH₃ | H | H |
| I.a.2 | Cl | H | H | H | F | CH₃ | H | H |
| I.a.3 | Br | H | H | H | F | CH₃ | H | H |
| I.a.4 | CN | H | H | H | F | CH₃ | H | H |
| I.a.5 | CH₃ | H | H | H | F | CH₃ | H | H |
| I.a.6 | F | H | H | F | F | CH₃ | H | H |
| I.a.7 | Cl | H | H | F | F | CH₃ | H | H |
| I.a.8 | F | H | H | Cl | F | CH₃ | H | H |
| I.a.9 | Cl | H | H | F | F | CH₃ | H | H |
| I.a.10 | CN | H | H | F | F | CH₃ | H | H |
| I.a.11 | F | H | H | CN | F | CH₃ | H | H |
| I.a.12 | CN | H | H | F | F | CH₃ | H | H |
| I.a.13 | F | H | F | H | F | CH₃ | H | H |
| I.a.14 | Cl | H | F | H | F | CH₃ | H | H |
| I.a.15 | CN | H | F | H | F | CH₃ | H | H |
| I.a.16 | F | F | F | H | F | CH₃ | H | H |
| I.a.17 | Cl | F | F | H | F | CH₃ | H | H |
| I.a.18 | F | Cl | F | H | F | CH₃ | H | H |
| I.a.19 | Cl | F | F | H | F | CH₃ | H | H |
| I.a.20 | CN | F | F | H | F | CH₃ | H | H |
| I.a.21 | F | CN | F | H | F | CH₃ | H | H |
| I.a.22 | CN | F | F | H | F | CH₃ | H | H |
| I.a.23 | F | F | H | F | F | CH₃ | H | H |
| I.a.24 | Cl | F | H | F | F | CH₃ | H | H |
| I.a.25 | F | Cl | H | F | F | CH₃ | H | H |
| I.a.26 | CN | F | H | F | F | CH₃ | H | H |
| I.a.27 | F | CN | H | F | F | CH₃ | H | H |
| I.a.28 | F | F | F | F | F | CH₃ | H | H |
| I.a.29 | Cl | F | F | F | F | CH₃ | H | H |
| I.a.30 | F | Cl | F | F | F | CH₃ | H | H |
| I.a.31 | CN | F | F | F | F | CH₃ | H | H |
| I.a.32 | F | CN | F | F | F | CH₃ | H | H |
| I.a.33 | H | F | F | F | F | CH₃ | H | H |
| I.a.34 | F | F | Br | F | F | CH₃ | H | H |
| I.a.35 | F | F | C≡CH | F | F | CH₃ | H | H |
| I.a.36 | CF₃ | Cl | H | H | F | CH₃ | H | H |
| I.a.37 | F | F | I | F | F | CH₃ | H | H |
| I.a.38 | F | H | H | H | F | CH₃ | CH₃ | H |
| I.a.39 | Cl | H | H | H | F | CH₃ | CH₃ | H |
| I.a.40 | Br | H | H | H | F | CH₃ | CH₃ | H |
| I.a.41 | CN | H | H | H | F | CH₃ | CH₃ | H |
| I.a.42 | CH₃ | H | H | H | F | CH₃ | CH₃ | H |
| I.a.43 | F | H | H | F | F | CH₃ | CH₃ | H |
| I.a.44 | Cl | H | H | F | F | CH₃ | CH₃ | H |
| I.a.45 | F | H | H | Cl | F | CH₃ | CH₃ | H |
| I.a.46 | Cl | H | H | F | F | CH₃ | CH₃ | H |
| I.a.47 | CN | H | H | F | F | CH₃ | CH₃ | H |
| I.a.48 | F | H | H | CN | F | CH₃ | CH₃ | H |
| I.a.49 | CN | H | H | F | F | CH₃ | CH₃ | H |
| I.a.50 | F | H | F | H | F | CH₃ | CH₃ | H |
| I.a.51 | Cl | H | F | H | F | CH₃ | CH₃ | H |
| I.a.52 | CN | H | F | H | F | CH₃ | CH₃ | H |
| I.a.53 | F | F | F | H | F | CH₃ | CH₃ | H |
| I.a.54 | Cl | F | F | H | F | CH₃ | CH₃ | H |
| I.a.55 | F | Cl | F | H | F | CH₃ | CH₃ | H |
| I.a.56 | Cl | F | F | H | F | CH₃ | CH₃ | H |
| I.a.57 | CN | F | F | H | F | CH₃ | CH₃ | H |
| I.a.58 | F | CN | F | H | F | CH₃ | CH₃ | H |
| I.a.59 | CN | F | F | H | F | CH₃ | CH₃ | H |
| I.a.60 | F | F | H | F | F | CH₃ | CH₃ | H |
| I.a.61 | Cl | F | H | F | F | CH₃ | CH₃ | H |
| I.a.62 | F | Cl | H | F | F | CH₃ | CH₃ | H |
| I.a.63 | CN | F | H | F | F | CH₃ | CH₃ | H |
| I.a.64 | F | CN | H | F | F | CH₃ | CH₃ | H |
| I.a.65 | F | F | F | F | F | CH₃ | CH₃ | H |
| I.a.66 | Cl | F | F | F | F | CH₃ | CH₃ | H |
| I.a.67 | F | Cl | F | F | F | CH₃ | CH₃ | H |
| I.a.68 | CN | F | F | F | F | CH₃ | CH₃ | H |
| I.a.69 | F | CN | F | F | F | CH₃ | CH₃ | H |
| I.a.70 | H | F | F | F | F | CH₃ | CH₃ | H |
| I.a.71 | F | F | Br | F | F | CH₃ | CH₃ | H |
| I.a.72 | F | F | C≡CH | F | F | CH₃ | CH₃ | H |
| I.a.73 | CF₃ | Cl | H | H | F | CH₃ | CH₃ | H |
| I.a.74 | F | F | I | F | F | CH₃ | CH₃ | H |
| I.a.75 | F | H | H | H | F | CH₃ | CH₃ | CH₃ |
| I.a.76 | Cl | H | H | H | F | CH₃ | CH₃ | CH₃ |
| I.a.77 | Br | H | H | H | F | CH₃ | CH₃ | CH₃ |
| I.a.78 | CN | H | H | H | F | CH₃ | CH₃ | CH₃ |
| I.a.79 | CH₃ | H | H | H | F | CH₃ | CH₃ | CH₃ |
| I.a.80 | F | H | H | F | F | CH₃ | CH₃ | CH₃ |
| I.a.81 | Cl | H | H | F | F | CH₃ | CH₃ | CH₃ |
| I.a.82 | F | H | H | Cl | F | CH₃ | CH₃ | CH₃ |
| I.a.83 | Cl | H | H | F | F | CH₃ | CH₃ | CH₃ |
| I.a.84 | CN | H | H | F | F | CH₃ | CH₃ | CH₃ |
| I.a.85 | F | H | H | CN | F | CH₃ | CH₃ | CH₃ |
| I.a.86 | CN | H | H | F | F | CH₃ | CH₃ | CH₃ |
| I.a.87 | F | H | F | H | F | CH₃ | CH₃ | CH₃ |
| I.a.88 | Cl | H | F | H | F | CH₃ | CH₃ | CH₃ |
| I.a.89 | CN | H | F | H | F | CH₃ | CH₃ | CH₃ |
| I.a.90 | F | F | F | H | F | CH₃ | CH₃ | CH₃ |
| I.a.91 | Cl | F | F | H | F | CH₃ | CH₃ | CH₃ |
| I.a.92 | F | Cl | F | H | F | CH₃ | CH₃ | CH₃ |
| I.a.93 | Cl | F | F | H | F | CH₃ | CH₃ | CH₃ |
| I.a.94 | CN | F | F | H | F | CH₃ | CH₃ | CH₃ |
| I.a.95 | F | CN | F | H | F | CH₃ | CH₃ | CH₃ |
| I.a.96 | CN | F | F | H | F | CH₃ | CH₃ | CH₃ |
| I.a.97 | F | F | H | F | F | CH₃ | CH₃ | CH₃ |
| I.a.98 | Cl | F | H | F | F | CH₃ | CH₃ | CH₃ |
| I.a.99 | F | Cl | H | F | F | CH₃ | CH₃ | CH₃ |
| I.a.100 | CN | F | H | F | F | CH₃ | CH₃ | CH₃ |
| I.a.101 | F | CN | H | F | F | CH₃ | CH₃ | CH₃ |
| I.a.102 | F | F | F | F | F | CH₃ | CH₃ | CH₃ |
| I.a.103 | Cl | F | F | F | F | CH₃ | CH₃ | CH₃ |
| I.a.104 | F | Cl | F | F | F | CH₃ | CH₃ | CH₃ |
| I.a.105 | CN | F | F | F | F | CH₃ | CH₃ | CH₃ |
| I.a.106 | F | CN | F | F | F | CH₃ | CH₃ | CH₃ |
| I.a.107 | H | F | F | F | F | CH₃ | CH₃ | CH₃ |
| I.a.108 | F | F | Br | F | F | CH₃ | CH₃ | CH₃ |
| I.a.109 | F | F | C≡CH | F | F | CH₃ | CH₃ | CH₃ |
| I.a.110 | CF₃ | Cl | H | H | F | CH₃ | CH₃ | CH₃ |
| I.a.111 | F | F | I | F | F | CH₃ | CH₃ | CH₃ |
| I.a.112 | F | H | H | H | F | F | F | F |
| I.a.113 | Cl | H | H | H | F | F | F | F |
| I.a.114 | Br | H | H | H | F | F | F | F |
| I.a.115 | CN | H | H | H | F | F | F | F |
| I.a.116 | CH₃ | H | H | H | F | F | F | F |
| I.a.117 | F | H | H | F | F | F | F | F |
| I.a.118 | Cl | H | H | F | F | F | F | F |
| I.a.119 | F | H | H | Cl | F | F | F | F |
| I.a.120 | Cl | H | H | F | F | F | F | F |
| I.a.121 | CN | H | H | F | F | F | F | F |
| I.a.122 | F | H | H | CN | F | F | F | F |
| I.a.123 | CN | H | H | F | F | F | F | F |
| I.a.124 | F | H | F | H | F | F | F | F |
| I.a.125 | Cl | H | F | H | F | F | F | F |
| I.a.126 | CN | H | F | H | F | F | F | F |
| I.a.127 | F | F | F | H | F | F | F | F |
| I.a.128 | Cl | F | F | H | F | F | F | F |
| I.a.129 | F | Cl | F | H | F | F | F | F |
| I.a.130 | Cl | F | F | H | F | F | F | F |
| I.a.131 | CN | F | F | H | F | F | F | F |
| I.a.132 | F | CN | F | H | F | F | F | F |
| I.a.133 | CN | F | F | H | F | F | F | F |
| I.a.134 | F | F | H | F | F | F | F | F |
| I.a.135 | Cl | F | H | F | F | F | F | F |
| I.a.136 | F | Cl | H | F | F | F | F | F |
| I.a.137 | CN | F | H | F | F | F | F | F |
| I.a.138 | F | CN | H | F | F | F | F | F |
| I.a.139 | F | F | F | F | F | F | F | F |
| I.a.140 | Cl | F | F | F | F | F | F | F |
| I.a.141 | F | Cl | F | F | F | F | F | F |
| I.a.142 | CN | F | F | F | F | F | F | F |
| I.a.143 | F | CN | F | F | F | F | F | F |
| I.a.144 | H | F | F | F | F | F | F | F |
| I.a.145 | F | F | Br | F | F | F | F | F |
| I.a.146 | F | F | C≡CH | F | F | F | F | F |
| I.a.147 | CF₃ | Cl | H | H | F | F | F | F |
| I.a.148 | F | F | I | F | F | F | F | F |
| I.a.149 | F | H | H | H | F | F | CF₃ | F |
| I.a.150 | Cl | H | H | H | F | F | CF₃ | F |
| I.a.151 | Br | H | H | H | F | F | CF₃ | F |
| I.a.152 | CN | H | H | H | F | F | CF₃ | F |
| I.a.153 | CH₃ | H | H | H | F | F | CF₃ | F |
| I.a.154 | F | H | H | F | F | F | CF₃ | F |
| I.a.155 | Cl | H | H | F | F | F | CF₃ | F |
| I.a.156 | F | H | H | Cl | F | F | CF₃ | F |
| I.a.157 | Cl | H | H | F | F | F | CF₃ | F |
| I.a.158 | CN | H | H | F | F | F | CF₃ | F |
| I.a.159 | F | H | H | CN | F | F | CF₃ | F |
| I.a.160 | CN | H | H | F | F | F | CF₃ | F |
| I.a.161 | F | H | F | H | F | F | CF₃ | F |
| I.a.162 | Cl | H | F | H | F | F | CF₃ | F |
| I.a.163 | CN | H | F | H | F | F | CF₃ | F |
| I.a.164 | F | F | F | H | F | F | CF₃ | F |
| I.a.165 | Cl | F | F | H | F | F | CF₃ | F |
| I.a.166 | F | Cl | F | H | F | F | CF₃ | F |
| I.a.167 | Cl | F | F | H | F | F | CF₃ | F |
| I.a.168 | CN | F | F | H | F | F | CF₃ | F |
| I.a.169 | F | CN | F | H | F | F | CF₃ | F |
| I.a.170 | CN | F | F | H | F | F | CF₃ | F |
| I.a.171 | F | F | H | F | F | F | CF₃ | F |
| I.a.172 | Cl | F | H | F | F | F | CF₃ | F |
| I.a.173 | F | Cl | H | F | F | F | CF₃ | F |
| I.a.174 | CN | F | H | F | F | F | CF₃ | F |
| I.a.175 | F | CN | H | F | F | F | CF₃ | F |
| I.a.176 | F | F | F | F | F | F | CF₃ | F |
| I.a.177 | Cl | F | F | F | F | F | CF₃ | F |
| I.a.178 | F | Cl | F | F | F | F | CF₃ | F |
| I.a.179 | CN | F | F | F | F | F | CF₃ | F |
| I.a.180 | F | CN | F | F | F | F | CF₃ | F |
| I.a.181 | H | F | F | F | F | F | CF₃ | F |
| I.a.182 | F | F | Br | F | F | F | CF₃ | F |
| I.a.183 | F | F | C≡CH | F | F | F | CF₃ | F |
| I.a.184 | CF₃ | Cl | H | H | F | F | CF₃ | F |
| I.a.185 | F | F | I | F | F | F | CF₃ | F |
| I.a.186 | F | H | H | H | F | F | CH₃ | F |
| I.a.187 | Cl | H | H | H | F | F | CH₃ | F |
| I.a.188 | Br | H | H | H | F | F | CH₃ | F |
| I.a.189 | CN | H | H | H | F | F | CH₃ | F |
| I.a.190 | CH₃ | H | H | H | F | F | CH₃ | F |
| I.a.191 | F | H | H | F | F | F | CH₃ | F |
| I.a.192 | Cl | H | H | F | F | F | CH₃ | F |
| I.a.193 | F | H | H | Cl | F | F | CH₃ | F |
| I.a.194 | Cl | H | H | F | F | F | CH₃ | F |
| I.a.195 | CN | H | H | F | F | F | CH₃ | F |
| I.a.196 | F | H | H | CN | F | F | CH₃ | F |
| I.a.197 | CN | H | H | F | F | F | CH₃ | F |
| I.a.198 | F | H | F | H | F | F | CH₃ | F |
| I.a.199 | Cl | H | F | H | F | F | CH₃ | F |
| I.a.200 | CN | H | F | H | F | F | CH₃ | F |
| I.a.201 | F | F | F | H | F | F | CH₃ | F |
| I.a.202 | Cl | F | F | H | F | F | CH₃ | F |
| I.a.203 | F | Cl | F | H | F | F | CH₃ | F |
| I.a.204 | Cl | F | F | H | F | F | CH₃ | F |
| I.a.205 | CN | F | F | H | F | F | CH₃ | F |
| I.a.206 | F | CN | F | H | F | F | CH₃ | F |
| I.a.207 | CN | F | F | H | F | F | CH₃ | F |
| I.a.208 | F | F | H | F | F | F | CH₃ | F |
| I.a.209 | Cl | F | H | F | F | F | CH₃ | F |
| I.a.210 | F | Cl | H | F | F | F | CH₃ | F |
| I.a.211 | CN | F | H | F | F | F | CH₃ | F |
| I.a.212 | F | CN | H | F | F | F | CH₃ | F |
| I.a.213 | F | F | F | F | F | F | CH₃ | F |
| I.a.214 | Cl | F | F | F | F | F | CH₃ | F |
| I.a.215 | F | Cl | F | F | F | F | CH₃ | F |
| I.a.216 | CN | F | F | F | F | F | CH₃ | F |
| I.a.217 | F | CN | F | F | F | F | CH₃ | F |
| I.a.218 | H | F | F | F | F | F | CH₃ | F |
| I.a.219 | F | F | Br | F | F | F | CH₃ | F |
| I.a.220 | F | F | C≡CH | F | F | F | CH₃ | F |
| I.a.221 | CF₃ | Cl | H | H | F | F | CH₃ | F |
| I.a.222 | F | F | I | F | F | F | CH₃ | F |
| I.a.223 | F | H | H | H | F | F | CH₃ | H |
| I.a.224 | Cl | H | H | H | F | F | CH₃ | H |
| I.a.225 | Br | H | H | H | F | F | CH₃ | H |
| I.a.226 | CN | H | H | H | F | F | CH₃ | H |
| I.a.227 | CH₃ | H | H | H | F | F | CH₃ | H |
| I.a.228 | F | H | H | F | F | F | CH₃ | H |
| I.a.229 | Cl | H | H | F | F | F | CH₃ | H |
| I.a.230 | F | H | H | Cl | F | F | CH₃ | H |
| I.a.231 | Cl | H | H | F | F | F | CH₃ | H |
| I.a.232 | CN | H | H | F | F | F | CH₃ | H |
| I.a.233 | F | H | H | CN | F | F | CH₃ | H |
| I.a.234 | CN | H | H | F | F | F | CH₃ | H |
| I.a.235 | F | H | F | H | F | F | CH₃ | H |
| I.a.236 | Cl | H | F | H | F | F | CH₃ | H |
| I.a.237 | CN | H | F | H | F | F | CH₃ | H |
| I.a.238 | F | F | F | H | F | F | CH₃ | H |
| I.a.239 | Cl | F | F | H | F | F | CH₃ | H |
| I.a.240 | F | Cl | F | H | F | F | CH₃ | H |
| I.a.241 | Cl | F | F | H | F | F | CH₃ | H |
| I.a.242 | CN | F | F | H | F | F | CH₃ | H |
| I.a.243 | F | CN | F | H | F | F | CH₃ | H |
| I.a.244 | CN | F | F | H | F | F | CH₃ | H |
| I.a.245 | F | F | H | F | F | F | CH₃ | H |
| I.a.246 | Cl | F | H | F | F | F | CH₃ | H |
| I.a.247 | F | Cl | H | F | F | F | CH₃ | H |
| I.a.248 | CN | F | H | F | F | F | CH₃ | H |
| I.a.249 | F | CN | H | F | F | F | CH₃ | H |
| I.a.250 | F | F | F | F | F | F | CH₃ | H |
| I.a.251 | Cl | F | F | F | F | F | CH₃ | H |
| I.a.252 | F | Cl | F | F | F | F | CH₃ | H |
| I.a.253 | CN | F | F | F | F | F | CH₃ | H |
| I.a.254 | F | CN | F | F | F | F | CH₃ | H |
| I.a.255 | H | F | F | F | F | F | CH₃ | H |
| I.a.256 | F | F | Br | F | F | F | CH₃ | H |
| I.a.257 | F | F | C≡CH | F | F | F | CH₃ | H |
| I.a.258 | CF₃ | Cl | H | H | F | F | CH₃ | H |
| I.a.259 | F | F | I | F | F | F | CH₃ | H |
| I.a.260 | F | H | H | H | F | F | CH₃ | CH₃ |
| I.a.261 | Cl | H | H | H | F | F | CH₃ | CH₃ |
| I.a.262 | Br | H | H | H | F | F | CH₃ | CH₃ |
| I.a.263 | CN | H | H | H | F | F | CH₃ | CH₃ |
| I.a.264 | CH₃ | H | H | H | F | F | CH₃ | CH₃ |
| I.a.265 | F | H | H | F | F | F | CH₃ | CH₃ |
| I.a.266 | Cl | H | H | F | F | F | CH₃ | CH₃ |
| I.a.267 | F | H | H | Cl | F | F | CH₃ | CH₃ |
| I.a.268 | Cl | H | H | F | F | F | CH₃ | CH₃ |
| I.a.269 | CN | H | H | F | F | F | CH₃ | CH₃ |
| I.a.270 | F | H | H | CN | F | F | CH₃ | CH₃ |
| I.a.271 | CN | H | H | F | F | F | CH₃ | CH₃ |
| I.a.272 | F | H | F | H | F | F | CH₃ | CH₃ |
| I.a.273 | Cl | H | F | H | F | F | CH₃ | CH₃ |
| I.a.274 | CN | H | F | H | F | F | CH₃ | CH₃ |
| I.a.275 | F | F | F | H | F | F | CH₃ | CH₃ |
| I.a.276 | Cl | F | F | H | F | F | CH₃ | CH₃ |
| I.a.277 | F | Cl | F | H | F | F | CH₃ | CH₃ |
| I.a.278 | Cl | F | F | H | F | F | CH₃ | CH₃ |
| I.a.279 | CN | F | F | H | F | F | CH₃ | CH₃ |
| I.a.280 | F | CN | F | H | F | F | CH₃ | CH₃ |
| I.a.281 | CN | F | F | H | F | F | CH₃ | CH₃ |
| I.a.282 | F | F | H | F | F | F | CH₃ | CH₃ |
| I.a.283 | Cl | F | H | F | F | F | CH₃ | CH₃ |
| I.a.284 | F | Cl | H | F | F | F | CH₃ | CH₃ |
| I.a.285 | CN | F | H | F | F | F | CH₃ | CH₃ |
| I.a.286 | F | CN | H | F | F | F | CH₃ | CH₃ |
| I.a.287 | F | F | F | F | F | F | CH₃ | CH₃ |
| I.a.288 | Cl | F | F | F | F | F | CH₃ | CH₃ |
| I.a.289 | F | Cl | F | F | F | F | CH₃ | CH₃ |
| I.a.290 | CN | F | F | F | F | F | CH₃ | CH₃ |
| I.a.291 | F | CN | F | F | F | F | CH₃ | CH₃ |
| I.a.292 | H | F | F | F | F | F | CH₃ | CH₃ |
| I.a.293 | F | F | Br | F | F | F | CH₃ | CH₃ |
| I.a.294 | F | F | C≡CH | F | F | F | CH₃ | CH₃ |
| I.a.295 | CF₃ | Cl | H | H | F | F | CH₃ | CH₃ |
| I.a.296 | F | F | I | F | F | F | CH₃ | CH₃ |
| I.a.297 | F | H | H | H | F | Cl | CH₃ | CH₃ |
| I.a.298 | Cl | H | H | H | F | Cl | CH₃ | CH₃ |
| I.a.299 | Br | H | H | H | F | Cl | CH₃ | CH₃ |
| I.a.300 | CN | H | H | H | F | Cl | CH₃ | CH₃ |
| I.a.301 | CH₃ | H | H | H | F | Cl | CH₃ | CH₃ |
| I.a.302 | F | H | H | F | F | Cl | CH₃ | CH₃ |
| I.a.303 | Cl | H | H | F | F | Cl | CH₃ | CH₃ |
| I.a.304 | F | H | H | Cl | F | Cl | CH₃ | CH₃ |
| I.a.305 | Cl | H | H | F | F | Cl | CH₃ | CH₃ |
| I.a.306 | CN | H | H | F | F | Cl | CH₃ | CH₃ |
| I.a.307 | F | H | H | CN | F | Cl | CH₃ | CH₃ |
| I.a.308 | CN | H | H | F | F | Cl | CH₃ | CH₃ |
| I.a.309 | F | H | F | H | F | Cl | CH₃ | CH₃ |
| I.a.310 | Cl | H | F | H | F | Cl | CH₃ | CH₃ |
| I.a.311 | CN | H | F | H | F | Cl | CH₃ | CH₃ |
| I.a.312 | F | F | F | H | F | Cl | CH₃ | CH₃ |
| I.a.313 | Cl | F | F | H | F | Cl | CH₃ | CH₃ |
| I.a.314 | F | Cl | F | H | F | Cl | CH₃ | CH₃ |
| I.a.315 | Cl | F | F | H | F | Cl | CH₃ | CH₃ |
| I.a.316 | CN | F | F | H | F | Cl | CH₃ | CH₃ |
| I.a.317 | F | CN | F | H | F | Cl | CH₃ | CH₃ |
| I.a.318 | CN | F | F | H | F | Cl | CH₃ | CH₃ |
| I.a.319 | F | F | H | F | F | Cl | CH₃ | CH₃ |
| I.a.320 | Cl | F | H | F | F | Cl | CH₃ | CH₃ |
| I.a.321 | F | Cl | H | F | F | Cl | CH₃ | CH₃ |
| I.a.322 | CN | F | H | F | F | Cl | CH₃ | CH₃ |
| I.a.323 | F | CN | H | F | F | Cl | CH₃ | CH₃ |
| I.a.324 | F | F | F | F | F | Cl | CH₃ | CH₃ |
| I.a.325 | Cl | F | F | F | F | Cl | CH₃ | CH₃ |
| I.a.326 | F | Cl | F | F | F | Cl | CH₃ | CH₃ |
| I.a.327 | CN | F | F | F | F | Cl | CH₃ | CH₃ |
| I.a.328 | F | CN | F | F | F | Cl | CH₃ | CH₃ |
| I.a.329 | H | F | F | F | F | Cl | CH₃ | CH₃ |
| I.a.330 | F | F | Br | F | F | Cl | CH₃ | CH₃ |
| I.a.331 | F | F | C≡CH | F | F | Cl | CH₃ | CH₃ |
| I.a.332 | CF₃ | Cl | H | H | F | Cl | CH₃ | CH₃ |
| I.a.333 | F | F | I | F | F | Cl | CH₃ | CH₃ |
| I.a.334 | F | H | H | H | F | F | C₂H₅ | CH₃ |
| I.a.335 | Cl | H | H | H | F | F | C₂H₅ | CH₃ |
| I.a.336 | Br | H | H | H | F | F | C₂H₅ | CH₃ |
| I.a.337 | CN | H | H | H | F | F | C₂H₅ | CH₃ |
| I.a.338 | CH₃ | H | H | H | F | F | C₂H₅ | CH₃ |
| I.a.339 | F | H | H | F | F | F | C₂H₅ | CH₃ |
| I.a.340 | Cl | H | H | F | F | F | C₂H₅ | CH₃ |
| I.a.341 | F | H | H | Cl | F | F | C₂H₅ | CH₃ |
| I.a.342 | Cl | H | H | F | F | F | C₂H₅ | CH₃ |
| I.a.343 | CN | H | H | F | F | F | C₂H₅ | CH₃ |
| I.a.344 | F | H | H | CN | F | F | C₂H₅ | CH₃ |
| I.a.345 | CN | H | H | F | F | F | C₂H₅ | CH₃ |
| I.a.346 | F | H | F | H | F | F | C₂H₅ | CH₃ |
| I.a.347 | Cl | H | F | H | F | F | C₂H₅ | CH₃ |
| I.a.348 | CN | H | F | H | F | F | C₂H₅ | CH₃ |
| I.a.349 | F | F | F | H | F | F | C₂H₅ | CH₃ |
| I.a.350 | Cl | F | F | H | F | F | C₂H₅ | CH₃ |
| I.a.351 | F | Cl | F | H | F | F | C₂H₅ | CH₃ |
| I.a.352 | Cl | F | F | H | F | F | C₂H₅ | CH₃ |
| I.a.353 | CN | F | F | H | F | F | C₂H₅ | CH₃ |
| I.a.354 | F | CN | F | H | F | F | C₂H₅ | CH₃ |
| I.a.355 | CN | F | F | H | F | F | C₂H₅ | CH₃ |
| I.a.356 | F | F | H | F | F | F | C₂H₅ | CH₃ |
| I.a.357 | Cl | F | H | F | F | F | C₂H₅ | CH₃ |
| I.a.358 | F | Cl | H | F | F | F | C₂H₅ | CH₃ |
| I.a.359 | CN | F | H | F | F | F | C₂H₅ | CH₃ |
| I.a.360 | F | CN | H | F | F | F | C₂H₅ | CH₃ |
| I.a.361 | F | F | F | F | F | F | C₂H₅ | CH₃ |
| I.a.362 | Cl | F | F | F | F | F | C₂H₅ | CH₃ |
| I.a.363 | F | Cl | F | F | F | F | C₂H₅ | CH₃ |
| I.a.364 | CN | F | F | F | F | F | C₂H₅ | CH₃ |
| I.a.365 | F | CN | F | F | F | F | C₂H₅ | CH₃ |
| I.a.366 | H | F | F | F | F | F | C₂H₅ | CH₃ |
| I.a.367 | F | F | Br | F | F | F | C₂H₅ | CH₃ |
| I.a.368 | F | F | C≡CH | F | F | F | C₂H₅ | CH₃ |
| I.a.369 | CF₃ | Cl | H | H | F | F | C₂H₅ | CH₃ |
| I.a.370 | F | F | I | F | F | F | C₂H₅ | CH₃ |
| I.a.371 | F | H | H | H | F | F | C₂H₅ | C₂H₅ |
| I.a.372 | Cl | H | H | H | F | F | C₂H₅ | C₂H₅ |
| I.a.373 | Br | H | H | H | F | F | C₂H₅ | C₂H₅ |
| I.a.374 | CN | H | H | H | F | F | C₂H₅ | C₂H₅ |
| I.a.375 | CH₃ | H | H | H | F | F | C₂H₅ | C₂H₅ |
| I.a.376 | F | H | H | F | F | F | C₂H₅ | C₂H₅ |
| I.a.377 | Cl | H | H | F | F | F | C₂H₅ | C₂H₅ |
| I.a.378 | F | H | H | Cl | F | F | C₂H₅ | C₂H₅ |
| I.a.379 | Cl | H | H | F | F | F | C₂H₅ | C₂H₅ |
| I.a.380 | CN | H | H | F | F | F | C₂H₅ | C₂H₅ |
| I.a.381 | F | H | H | CN | F | F | C₂H₅ | C₂H₅ |
| I.a.382 | CN | H | H | F | F | F | C₂H₅ | C₂H₅ |
| I.a.383 | F | H | F | H | F | F | C₂H₅ | C₂H₅ |
| I.a.384 | Cl | H | F | H | F | F | C₂H₅ | C₂H₅ |
| I.a.385 | CN | H | F | H | F | F | C₂H₅ | C₂H₅ |
| I.a.386 | F | F | F | H | F | F | C₂H₅ | C₂H₅ |
| I.a.387 | Cl | F | F | H | F | F | C₂H₅ | C₂H₅ |
| I.a.388 | F | Cl | F | H | F | F | C₂H₅ | C₂H₅ |
| I.a.389 | Cl | F | F | H | F | F | C₂H₅ | C₂H₅ |
| I.a.390 | CN | F | F | H | F | F | C₂H₅ | C₂H₅ |
| I.a.391 | F | CN | F | H | F | F | C₂H₅ | C₂H₅ |
| I.a.392 | CN | F | F | H | F | F | C₂H₅ | C₂H₅ |
| I.a.393 | F | F | H | F | F | F | C₂H₅ | C₂H₅ |
| I.a.394 | Cl | F | H | F | F | F | C₂H₅ | C₂H₅ |
| I.a.395 | F | Cl | H | F | F | F | C₂H₅ | C₂H₅ |
| I.a.396 | CN | F | H | F | F | F | C₂H₅ | C₂H₅ |
| I.a.397 | F | CN | H | F | F | F | C₂H₅ | C₂H₅ |
| I.a.398 | F | F | F | F | F | F | C₂H₅ | C₂H₅ |
| I.a.399 | Cl | F | F | F | F | F | C₂H₅ | C₂H₅ |
| I.a.400 | F | Cl | F | F | F | F | C₂H₅ | C₂H₅ |
| I.a.401 | CN | F | F | F | F | F | C₂H₅ | C₂H₅ |
| I.a.402 | F | CN | F | F | F | F | C₂H₅ | C₂H₅ |
| I.a.403 | H | F | F | F | F | F | C₂H₅ | C₂H₅ |
| I.a.404 | F | F | Br | F | F | F | C₂H₅ | C₂H₅ |
| I.a.405 | F | F | C≡CH | F | F | F | C₂H₅ | C₂H₅ |
| I.a.406 | CF₃ | Cl | H | H | F | F | C₂H₅ | C₂H₅ |
| I.a.407 | F | F | I | F | F | F | C₂H₅ | C₂H₅ |
| I.a.408 | F | H | H | H | F | H | —(CH₂)₂— | |
| I.a.409 | Cl | H | H | H | F | H | —(CH₂)₂— | |
| I.a.410 | Br | H | H | H | F | H | —(CH₂)₂— | |
| I.a.411 | CN | H | H | H | F | H | —(CH₂)₂— | |
| I.a.412 | CH₃ | H | H | H | F | H | —(CH₂)₂— | |
| I.a.413 | F | H | H | F | F | H | —(CH₂)₂— | |
| I.a.414 | Cl | H | H | F | F | H | —(CH₂)₂— | |
| I.a.415 | F | H | H | Cl | F | H | —(CH₂)₂— | |
| I.a.416 | Cl | H | H | F | F | H | —(CH₂)₂— | |
| I.a.417 | CN | H | H | F | F | H | —(CH₂)₂— | |
| I.a.418 | F | H | H | CN | F | H | —(CH₂)₂— | |
| I.a.419 | CN | H | H | F | F | H | —(CH₂)₂— | |
| I.a.420 | F | H | F | H | F | H | —(CH₂)₂— | |
| I.a.421 | Cl | H | F | H | F | H | —(CH₂)₂— | |
| I.a.422 | CN | H | F | H | F | H | —(CH₂)₂— | |
| I.a.423 | F | F | F | H | F | H | —(CH₂)₂— | |
| I.a.424 | Cl | F | F | H | F | H | —(CH₂)₂— | |
| I.a.425 | F | Cl | F | H | F | H | —(CH₂)₂— | |
| I.a.426 | Cl | F | F | H | F | H | —(CH₂)₂— | |
| I.a.427 | CN | F | F | H | F | H | —(CH₂)₂— | |
| I.a.428 | F | CN | F | H | F | H | —(CH₂)₂— | |
| I.a.429 | CN | F | F | H | F | H | —(CH₂)₂— | |
| I.a.430 | F | F | H | F | F | H | —(CH₂)₂— | |
| I.a.431 | Cl | F | H | F | F | H | —(CH₂)₂— | |
| I.a.432 | F | Cl | H | F | F | H | —(CH₂)₂— | |
| I.a.433 | CN | F | H | F | F | H | —(CH₂)₂— | |
| I.a.434 | F | CN | H | F | F | H | —(CH₂)₂— | |
| I.a.435 | F | F | F | F | F | H | —(CH₂)₂— | |
| I.a.436 | Cl | F | F | F | F | H | —(CH₂)₂— | |
| I.a.437 | F | Cl | F | F | F | H | —(CH₂)₂— | |
| I.a.438 | CN | F | F | F | F | H | —(CH₂)₂— | |
| I.a.439 | F | CN | F | F | F | H | —(CH₂)₂— | |
| I.a.440 | H | F | F | F | F | H | —(CH₂)₂— | |
| I.a.441 | F | F | Br | F | F | H | —(CH₂)₂— | |
| I.a.442 | F | F | C≡CH | F | F | H | —(CH₂)₂— | |
| I.a.443 | CF₃ | Cl | H | H | F | H | —(CH₂)₂— | |
| I.a.444 | F | F | I | F | F | H | —(CH₂)₂— | |
| I.a.445 | F | H | H | H | F | H | —(CH₂)₃— | |
| I.a.446 | Cl | H | H | H | F | H | —(CH₂)₃— | |
| I.a.447 | Br | H | H | H | F | H | —(CH₂)₃— | |
| I.a.448 | CN | H | H | H | F | H | —(CH₂)₃— | |
| I.a.449 | CH₃ | H | H | H | F | H | —(CH₂)₃— | |
| I.a.450 | F | H | H | F | F | H | —(CH₂)₃— | |
| I.a.451 | Cl | H | H | F | F | H | —(CH₂)₃— | |
| I.a.452 | F | H | H | Cl | F | H | —(CH₂)₃— | |
| I.a.453 | Cl | H | H | F | F | H | —(CH₂)₃— | |
| I.a.454 | CN | H | H | F | F | H | —(CH₂)₃— | |
| I.a.455 | F | H | H | CN | F | H | —(CH₂)₃— | |
| I.a.456 | CN | H | H | F | F | H | —(CH₂)₃— | |
| I.a.457 | F | H | F | H | F | H | —(CH₂)₃— | |
| I.a.458 | Cl | H | F | H | F | H | —(CH₂)₃— | |
| I.a.459 | CN | H | F | H | F | H | —(CH₂)₃— | |
| I.a.460 | F | F | F | H | F | H | —(CH₂)₃— | |
| I.a.461 | Cl | F | F | H | F | H | —(CH₂)₃— | |
| I.a.462 | F | Cl | F | H | F | H | —(CH₂)₃— | |
| I.a.463 | Cl | F | F | H | F | H | —(CH₂)₃— | |
| I.a.464 | CN | F | F | H | F | H | —(CH₂)₃— | |
| I.a.465 | F | CN | F | H | F | H | —(CH₂)₃— | |
| I.a.466 | CN | F | F | H | F | H | —(CH₂)₃— | |
| I.a.467 | F | F | H | F | F | H | —(CH₂)₃— | |
| I.a.468 | Cl | F | H | F | F | H | —(CH₂)₃— | |
| I.a.469 | F | Cl | H | F | F | H | —(CH₂)₃— | |
| I.a.470 | CN | F | H | F | F | H | —(CH₂)₃— | |
| I.a.471 | F | CN | H | F | F | H | —(CH₂)₃— | |
| I.a.472 | F | F | F | F | F | H | —(CH₂)₃— | |
| I.a.473 | Cl | F | F | F | F | H | —(CH₂)₃— | |
| I.a.474 | F | Cl | F | F | F | H | —(CH₂)₃— | |
| I.a.475 | CN | F | F | F | F | H | —(CH₂)₃— | |
| I.a.476 | F | CN | F | F | F | H | —(CH₂)₃— | |
| I.a.477 | H | F | F | F | F | H | —(CH₂)₃— | |
| I.a.478 | F | F | Br | F | F | H | —(CH₂)₃— | |
| I.a.479 | F | F | C≡CH | F | F | H | —(CH₂)₃— | |
| I.a.480 | CF₃ | Cl | H | H | F | H | —(CH₂)₃— | |
| I.a.481 | F | F | I | F | F | H | —(CH₂)₃— | |
| I.a.482 | F | H | H | H | F | H | —(CH₂)₄— | |
| I.a.483 | Cl | H | H | H | F | H | —(CH₂)₄— | |
| I.a.484 | Br | H | H | H | F | H | —(CH₂)₄— | |
| I.a.485 | CN | H | H | H | F | H | —(CH₂)₄— | |
| I.a.486 | CH₃ | H | H | H | F | H | —(CH₂)₄— | |
| I.a.487 | F | H | H | F | F | H | —(CH₂)₄— | |
| I.a.488 | Cl | H | H | F | F | H | —(CH₂)₄— | |
| I.a.489 | F | H | H | Cl | F | H | —(CH₂)₄— | |
| I.a.490 | Cl | H | H | F | F | H | —(CH₂)₄— | |
| I.a.491 | CN | H | H | F | F | H | —(CH₂)₄— | |
| I.a.492 | F | H | H | CN | F | H | —(CH₂)₄— | |
| I.a.493 | CN | H | H | F | F | H | —(CH₂)₄— | |
| I.a.494 | F | H | F | H | F | H | —(CH₂)₄— | |
| I.a.495 | Cl | H | F | H | F | H | —(CH₂)₄— | |
| I.a.496 | CN | H | F | H | F | H | —(CH₂)₄— | |
| I.a.497 | F | F | F | H | F | H | —(CH₂)₄— | |
| I.a.498 | Cl | F | F | H | F | H | —(CH₂)₄— | |
| I.a.499 | F | Cl | F | H | F | H | —(CH₂)₄— | |
| I.a.500 | Cl | F | F | H | F | H | —(CH₂)₄— | |
| I.a.501 | CN | F | F | H | F | H | —(CH₂)₄— | |
| I.a.502 | F | CN | F | H | F | H | —(CH₂)₄— | |
| I.a.503 | CN | F | F | H | F | H | —(CH₂)₄— | |
| I.a.504 | F | F | H | F | F | H | —(CH₂)₄— | |
| I.a.505 | Cl | F | H | F | F | H | —(CH₂)₄— | |
| I.a.506 | F | Cl | H | F | F | H | —(CH₂)₄— | |
| I.a.507 | CN | F | H | F | F | H | —(CH₂)₄— | |
| I.a.508 | F | CN | H | F | F | H | —(CH₂)₄— | |
| I.a.509 | F | F | F | F | F | H | —(CH₂)₄— | |
| I.a.510 | Cl | F | F | F | F | H | —(CH₂)₄— | |
| I.a.511 | F | Cl | F | F | F | H | —(CH₂)₄— | |
| I.a.512 | CN | F | F | F | F | H | —(CH₂)₄— | |
| I.a.513 | F | CN | F | F | F | H | —(CH₂)₄— | |
| I.a.514 | H | F | F | F | F | H | —(CH₂)₄— | |
| I.a.515 | F | F | Br | F | F | H | —(CH₂)₄— | |
| I.a.516 | F | F | C≡CH | F | F | H | —(CH₂)₄— | |
| I.a.517 | CF₃ | Cl | H | H | F | H | —(CH₂)₄— | |
| I.a.518 | F | F | I | F | F | H | —(CH₂)₄— | |
| I.a.519 | F | H | H | H | F | H | —(CH₂)₅— | |
| I.a.520 | Cl | H | H | H | F | H | —(CH₂)₅— | |
| I.a.521 | Br | H | H | H | F | H | —(CH₂)₅— | |
| I.a.522 | CN | H | H | H | F | H | —(CH₂)₅— | |
| I.a.523 | CH₃ | H | H | H | F | H | —(CH₂)₅— | |
| I.a.524 | F | H | H | F | F | H | —(CH₂)₅— | |
| I.a.525 | Cl | H | H | F | F | H | —(CH₂)₅— | |
| I.a.526 | F | H | H | Cl | F | H | —(CH₂)₅— | |
| I.a.527 | Cl | H | H | F | F | H | —(CH₂)₅— | |
| I.a.528 | CN | H | H | F | F | H | —(CH₂)₅— | |
| I.a.529 | F | H | H | CN | F | H | —(CH₂)₅— | |
| I.a.530 | CN | H | H | F | F | H | —(CH₂)₅— | |
| I.a.531 | F | H | F | H | F | H | —(CH₂)₅— | |
| I.a.532 | Cl | H | F | H | F | H | —(CH₂)₅— | |
| I.a.533 | CN | H | F | H | F | H | —(CH₂)₅— | |
| I.a.534 | F | F | F | H | F | H | —(CH₂)₅— | |
| I.a.535 | Cl | F | F | H | F | H | —(CH₂)₅— | |
| I.a.536 | F | Cl | F | H | F | H | —(CH₂)₅— | |
| I.a.537 | Cl | F | F | H | F | H | —(CH₂)₅— | |
| I.a.538 | CN | F | F | H | F | H | —(CH₂)₅— | |
| I.a.539 | F | CN | F | H | F | H | —(CH₂)₅— | |
| I.a.540 | CN | F | F | H | F | H | —(CH₂)₅— | |
| I.a.541 | F | F | H | F | F | H | —(CH₂)₅— | |
| I.a.542 | Cl | F | H | F | F | H | —(CH₂)₅— | |
| I.a.543 | F | Cl | H | F | F | H | —(CH₂)₅— | |
| I.a.544 | CN | F | H | F | F | H | —(CH₂)₅— | |
| I.a.545 | F | CN | H | F | F | H | —(CH₂)₅— | |
| I.a.546 | F | F | F | F | F | H | —(CH₂)₅— | |
| I.a.547 | Cl | F | F | F | F | H | —(CH₂)₅— | |
| I.a.548 | F | Cl | F | F | F | H | —(CH₂)₅— | |
| I.a.549 | CN | F | F | F | F | H | —(CH₂)₅— | |
| I.a.550 | F | CN | F | F | F | H | —(CH₂)₅— | |
| I.a.551 | H | F | F | F | F | H | —(CH₂)₅— | |
| I.a.552 | F | F | Br | F | F | H | —(CH₂)₅— | |
| I.a.553 | F | F | C≡CH | F | F | H | —(CH₂)₅— | |
| I.a.554 | CF₃ | Cl | H | H | F | H | —(CH₂)₅— | |
| I.a.555 | F | F | I | F | F | H | —(CH₂)₅— | |
| I.a.556 | F | H | H | H | F | CH₃ | —(CH₂)₂— | |
| I.a.557 | Cl | H | H | H | F | CH₃ | —(CH₂)₂— | |
| I.a.558 | Br | H | H | H | F | CH₃ | —(CH₂)₂— | |
| I.a.559 | CN | H | H | H | F | CH₃ | —(CH₂)₂— | |
| I.a.560 | CH₃ | H | H | H | F | CH₃ | —(CH₂)₂— | |
| I.a.561 | F | H | H | F | F | CH₃ | —(CH₂)₂— | |
| I.a.562 | Cl | H | H | F | F | CH₃ | —(CH₂)₂— | |
| I.a.563 | F | H | H | Cl | F | CH₃ | —(CH₂)₂— | |
| I.a.564 | Cl | H | H | F | F | CH₃ | —(CH₂)₂— | |
| I.a.565 | CN | H | H | F | F | CH₃ | —(CH₂)₂— | |
| I.a.566 | F | H | H | CN | F | CH₃ | —(CH₂)₂— | |
| I.a.567 | CN | H | H | F | F | CH₃ | —(CH₂)₂— | |
| I.a.568 | F | H | F | H | F | CH₃ | —(CH₂)₂— | |
| I.a.569 | Cl | H | F | H | F | CH₃ | —(CH₂)₂— | |
| I.a.570 | CN | H | F | H | F | CH₃ | —(CH₂)₂— | |
| I.a.571 | F | F | F | H | F | CH₃ | —(CH₂)₂— | |
| I.a.572 | Cl | F | F | H | F | CH₃ | —(CH₂)₂— | |
| I.a.573 | F | Cl | F | H | F | CH₃ | —(CH₂)₂— | |
| I.a.574 | Cl | F | F | H | F | CH₃ | —(CH₂)₂— | |
| I.a.575 | CN | F | F | H | F | CH₃ | —(CH₂)₂— | |
| I.a.576 | F | CN | F | H | F | CH₃ | —(CH₂)₂— | |
| I.a.577 | CN | F | F | H | F | CH₃ | —(CH₂)₂— | |
| I.a.578 | F | F | H | F | F | CH₃ | —(CH₂)₂— | |
| I.a.579 | Cl | F | H | F | F | CH₃ | —(CH₂)₂— | |
| I.a.580 | F | Cl | H | F | F | CH₃ | —(CH₂)₂— | |
| I.a.581 | CN | F | H | F | F | CH₃ | —(CH₂)₂— | |
| I.a.582 | F | CN | H | F | F | CH₃ | —(CH₂)₂— | |
| I.a.583 | F | F | F | F | F | CH₃ | —(CH₂)₂— | |
| I.a.584 | Cl | F | F | F | F | CH₃ | —(CH₂)₂— | |
| I.a.585 | F | Cl | F | F | F | CH₃ | —(CH₂)₂— | |
| I.a.586 | CN | F | F | F | F | CH₃ | —(CH₂)₂— | |
| I.a.587 | F | CN | F | F | F | CH₃ | —(CH₂)₂— | |
| I.a.588 | H | F | F | F | F | CH₃ | —(CH₂)₂— | |
| I.a.589 | F | F | Br | F | F | CH₃ | —(CH₂)₂— | |
| I.a.590 | F | F | C≡CH | F | F | CH₃ | —(CH₂)₂— | |
| I.a.591 | CF₃ | Cl | H | H | F | CH₃ | —(CH₂)₂— | |
| I.a.592 | F | F | I | F | F | CH₃ | —(CH₂)₂— | |
| I.a.593 | F | H | H | H | F | CH₃ | —(CH₂)₃— | |
| I.a.594 | Cl | H | H | H | F | CH₃ | —(CH₂)₃— | |
| I.a.595 | Br | H | H | H | F | CH₃ | —(CH₂)₃— | |
| I.a.596 | CN | H | H | H | F | CH₃ | —(CH₂)₃— | |
| I.a.597 | CH₃ | H | H | H | F | CH₃ | —(CH₂)₃— | |
| I.a.598 | F | H | H | F | F | CH₃ | —(CH₂)₃— | |
| I.a.599 | Cl | H | H | F | F | CH₃ | —(CH₂)₃— | |
| I.a.600 | F | H | H | Cl | F | CH₃ | —(CH₂)₃— | |
| I.a.601 | Cl | H | H | F | F | CH₃ | —(CH₂)₃— | |
| I.a.602 | CN | H | H | F | F | CH₃ | —(CH₂)₃— | |
| I.a.603 | F | H | H | CN | F | CH₃ | —(CH₂)₃— | |
| I.a.604 | CN | H | H | F | F | CH₃ | —(CH₂)₃— | |
| I.a.605 | F | H | F | H | F | CH₃ | —(CH₂)₃— | |
| I.a.606 | Cl | H | F | H | F | CH₃ | —(CH₂)₃— | |
| I.a.607 | CN | H | F | H | F | CH₃ | —(CH₂)₃— | |
| I.a.608 | F | F | F | H | F | CH₃ | —(CH₂)₃— | |
| I.a.609 | Cl | F | F | H | F | CH₃ | —(CH₂)₃— | |
| I.a.610 | F | Cl | F | H | F | CH₃ | —(CH₂)₃— | |
| I.a.611 | Cl | F | F | H | F | CH₃ | —(CH₂)₃— | |
| I.a.612 | CN | F | F | H | F | CH₃ | —(CH₂)₃— | |
| I.a.613 | F | CN | F | H | F | CH₃ | —(CH₂)₃— | |
| I.a.614 | CN | F | F | H | F | CH₃ | —(CH₂)₃— | |
| I.a.615 | F | F | H | F | F | CH₃ | —(CH₂)₃— | |
| I.a.616 | Cl | F | H | F | F | CH₃ | —(CH₂)₃— | |
| I.a.617 | F | Cl | H | F | F | CH₃ | —(CH₂)₃— | |
| I.a.618 | CN | F | H | F | F | CH₃ | —(CH₂)₃— | |
| I.a.619 | F | CN | H | F | F | CH₃ | —(CH₂)₃— | |
| I.a.620 | F | F | F | F | F | CH₃ | —(CH₂)₃— | |
| I.a.621 | Cl | F | F | F | F | CH₃ | —(CH₂)₃— | |
| I.a.622 | F | Cl | F | F | F | CH₃ | —(CH₂)₃— | |
| I.a.623 | CN | F | F | F | F | CH₃ | —(CH₂)₃— | |
| I.a.624 | F | CN | F | F | F | CH₃ | —(CH₂)₃— | |
| I.a.625 | H | F | F | F | F | CH₃ | —(CH₂)₃— | |
| I.a.626 | F | F | Br | F | F | CH₃ | —(CH₂)₃— | |
| I.a.627 | F | F | C≡CH | F | F | CH₃ | —(CH₂)₃— | |
| I.a.628 | CF₃ | Cl | H | H | F | CH₃ | —(CH₂)₃— | |
| I.a.629 | F | F | I | F | F | CH₃ | —(CH₂)₃— | |
| I.a.630 | F | H | H | H | F | CH₃ | —(CH₂)₄— | |
| I.a.631 | Cl | H | H | H | F | CH₃ | —(CH₂)₄— | |
| I.a.632 | Br | H | H | H | F | CH₃ | —(CH₂)₄— | |
| I.a.633 | CN | H | H | H | F | CH₃ | —(CH₂)₄— | |
| I.a.634 | CH₃ | H | H | H | F | CH₃ | —(CH₂)₄— | |
| I.a.635 | F | H | H | F | F | CH₃ | —(CH₂)₄— | |
| I.a.636 | Cl | H | H | F | F | CH₃ | —(CH₂)₄— | |
| I.a.637 | F | H | H | Cl | F | CH₃ | —(CH₂)₄— | |
| I.a.638 | Cl | H | H | F | F | CH₃ | —(CH₂)₄— | |
| I.a.639 | CN | H | H | F | F | CH₃ | —(CH₂)₄— | |
| I.a.640 | F | H | H | CN | F | CH₃ | —(CH₂)₄— | |
| I.a.641 | CN | H | H | F | F | CH₃ | —(CH₂)₄— | |
| I.a.642 | F | H | F | H | F | CH₃ | —(CH₂)₄— | |
| I.a.643 | Cl | H | F | H | F | CH₃ | —(CH₂)₄— | |
| I.a.644 | CN | H | F | H | F | CH₃ | —(CH₂)₄— | |
| I.a.645 | F | F | F | H | F | CH₃ | —(CH₂)₄— | |
| I.a.646 | Cl | F | F | H | F | CH₃ | —(CH₂)₄— | |
| I.a.647 | F | Cl | F | H | F | CH₃ | —(CH₂)₄— | |
| I.a.648 | Cl | F | F | H | F | CH₃ | —(CH₂)₄— | |
| I.a.649 | CN | F | F | H | F | CH₃ | —(CH₂)₄— | |
| I.a.650 | F | CN | F | H | F | CH₃ | —(CH₂)₄— | |
| I.a.651 | CN | F | F | H | F | CH₃ | —(CH₂)₄— | |
| I.a.652 | F | F | H | F | F | CH₃ | —(CH₂)₄— | |
| I.a.653 | Cl | F | H | F | F | CH₃ | —(CH₂)₄— | |
| I.a.654 | F | Cl | H | F | F | CH₃ | —(CH₂)₄— | |
| I.a.655 | CN | F | H | F | F | CH₃ | —(CH₂)₄— | |
| I.a.656 | F | CN | H | F | F | CH₃ | —(CH₂)₄— | |
| I.a.657 | F | F | F | F | F | CH₃ | —(CH₂)₄— | |
| I.a.658 | Cl | F | F | F | F | CH₃ | —(CH₂)₄— | |
| I.a.659 | F | Cl | F | F | F | CH₃ | —(CH₂)₄— | |
| I.a.660 | CN | F | F | F | F | CH₃ | —(CH₂)₄— | |
| I.a.661 | F | CN | F | F | F | CH₃ | —(CH₂)₄— | |
| I.a.662 | H | F | F | F | F | CH₃ | —(CH₂)₄— | |
| I.a.663 | F | F | Br | F | F | CH₃ | —(CH₂)₄— | |
| I.a.664 | F | F | C≡CH | F | F | CH₃ | —(CH₂)₄— | |
| I.a.665 | CF₃ | Cl | H | H | F | CH₃ | —(CH₂)₄— | |
| I.a.666 | F | F | I | F | F | CH₃ | —(CH₂)₄— | |
| I.a.667 | F | H | H | H | F | CH₃ | —(CH₂)₅— | |
| I.a.668 | Cl | H | H | H | F | CH₃ | —(CH₂)₅— | |
| I.a.669 | Br | H | H | H | F | CH₃ | —(CH₂)₅— | |
| I.a.670 | CN | H | H | H | F | CH₃ | —(CH₂)₅— | |
| I.a.671 | CH₃ | H | H | H | F | CH₃ | —(CH₂)₅— | |
| I.a.672 | F | H | H | F | F | CH₃ | —(CH₂)₅— | |
| I.a.673 | Cl | H | H | F | F | CH₃ | —(CH₂)₅— | |
| I.a.674 | F | H | H | Cl | F | CH₃ | —(CH₂)₅— | |
| I.a.675 | Cl | H | H | F | F | CH₃ | —(CH₂)₅— | |
| I.a.676 | CN | H | H | F | F | CH₃ | —(CH₂)₅— | |
| I.a.677 | F | H | H | CN | F | CH₃ | —(CH₂)₅— | |
| I.a.678 | CN | H | H | F | F | CH₃ | —(CH₂)₅— | |
| I.a.679 | F | H | F | H | F | CH₃ | —(CH₂)₅— | |
| I.a.680 | Cl | H | F | H | F | CH₃ | —(CH₂)₅— | |
| I.a.681 | CN | H | F | H | F | CH₃ | —(CH₂)₅— | |
| I.a.682 | F | F | F | H | F | CH₃ | —(CH₂)₅— | |
| I.a.683 | Cl | F | F | H | F | CH₃ | —(CH₂)₅— | |
| I.a.684 | F | Cl | F | H | F | CH₃ | —(CH₂)₅— | |
| I.a.685 | Cl | F | F | H | F | CH₃ | —(CH₂)₅— | |
| I.a.686 | CN | F | F | H | F | CH₃ | —(CH₂)₅— | |
| I.a.687 | F | CN | F | H | F | CH₃ | —(CH₂)₅— | |
| I.a.688 | CN | F | F | H | F | CH₃ | —(CH₂)₅— | |
| I.a.689 | F | F | H | F | F | CH₃ | —(CH₂)₅— | |
| I.a.690 | Cl | F | H | F | F | CH₃ | —(CH₂)₅— | |
| I.a.691 | F | Cl | H | F | F | CH₃ | —(CH₂)₅— | |
| I.a.692 | CN | F | H | F | F | CH₃ | —(CH₂)₅— | |
| I.a.693 | F | CN | H | F | F | CH₃ | —(CH₂)₅— | |
| I.a.694 | F | F | F | F | F | CH₃ | —(CH₂)₅— | |
| I.a.695 | Cl | F | F | F | F | CH₃ | —(CH₂)₅— | |
| I.a.696 | F | Cl | F | F | F | CH₃ | —(CH₂)₅— | |
| I.a.697 | CN | F | F | F | F | CH₃ | —(CH₂)₅— | |
| I.a.698 | F | CN | F | F | F | CH₃ | —(CH₂)₅— | |
| I.a.699 | H | F | F | F | F | CH₃ | —(CH₂)₅— | |
| I.a.700 | F | F | Br | F | F | CH₃ | —(CH₂)₅— | |
| I.a.701 | F | F | C≡CH | F | F | CH₃ | —(CH₂)₅— | |
| I.a.702 | CF₃ | Cl | H | H | F | CH₃ | —(CH₂)₅— | |
| I.a.703 | F | F | I | F | F | CH₃ | —(CH₂)₅— | |
| I.a.704 | F | H | H | H | F | F | —(CH₂)₂— | |
| I.a.705 | Cl | H | H | H | F | F | —(CH₂)₂— | |
| I.a.706 | Br | H | H | H | F | F | —(CH₂)₂— | |
| I.a.707 | CN | H | H | H | F | F | —(CH₂)₂— | |
| I.a.708 | CH₃ | H | H | H | F | F | —(CH₂)₂— | |
| I.a.709 | F | H | H | F | F | F | —(CH₂)₂— | |
| I.a.710 | Cl | H | H | F | F | F | —(CH₂)₂— | |
| I.a.711 | F | H | H | Cl | F | F | —(CH₂)₂— | |
| I.a.712 | Cl | H | H | F | F | F | —(CH₂)₂— | |
| I.a.713 | CN | H | H | F | F | F | —(CH₂)₂— | |
| I.a.714 | F | H | H | CN | F | F | —(CH₂)₂— | |
| I.a.715 | CN | H | H | F | F | F | —(CH₂)₂— | |
| I.a.716 | F | H | F | H | F | F | —(CH₂)₂— | |
| I.a.717 | Cl | H | F | H | F | F | —(CH₂)₂— | |
| I.a.718 | CN | H | F | H | F | F | —(CH₂)₂— | |
| I.a.719 | F | F | F | H | F | F | —(CH₂)₂— | |
| I.a.720 | Cl | F | F | H | F | F | —(CH₂)₂— | |
| I.a.721 | F | Cl | F | H | F | F | —(CH₂)₂— | |
| I.a.722 | Cl | F | F | H | F | F | —(CH₂)₂— | |
| I.a.723 | CN | F | F | H | F | F | —(CH₂)₂— | |
| I.a.724 | F | CN | F | H | F | F | —(CH₂)₂— | |
| I.a.725 | CN | F | F | H | F | F | —(CH₂)₂— | |
| I.a.726 | F | F | H | F | F | F | —(CH₂)₂— | |
| I.a.727 | Cl | F | H | F | F | F | —(CH₂)₂— | |
| I.a.728 | F | Cl | H | F | F | F | —(CH₂)₂— | |
| I.a.729 | CN | F | H | F | F | F | —(CH₂)₂— | |
| I.a.730 | F | CN | H | F | F | F | —(CH₂)₂— | |
| I.a.731 | F | F | F | F | F | F | —(CH₂)₂— | |
| I.a.732 | Cl | F | F | F | F | F | —(CH₂)₂— | |
| I.a.733 | F | Cl | F | F | F | F | —(CH₂)₂— | |
| I.a.734 | CN | F | F | F | F | F | —(CH₂)₂— | |
| I.a.735 | F | CN | F | F | F | F | —(CH₂)₂— | |
| I.a.736 | H | F | F | F | F | F | —(CH₂)₂— | |
| I.a.737 | F | F | Br | F | F | F | —(CH₂)₂— | |
| I.a.738 | F | F | C≡CH | F | F | F | —(CH₂)₂— | |
| I.a.739 | CF₃ | Cl | H | H | F | F | —(CH₂)₂— | |
| I.a.740 | F | F | I | F | F | F | —(CH₂)₂— | |
| I.a.741 | F | H | H | H | F | F | —(CH₂)₃— | |
| I.a.742 | Cl | H | H | H | F | F | —(CH₂)₃— | |
| I.a.743 | Br | H | H | H | F | F | —(CH₂)₃— | |
| I.a.744 | CN | H | H | H | F | F | —(CH₂)₃— | |
| I.a.745 | CH₃ | H | H | H | F | F | —(CH₂)₃— | |
| I.a.746 | F | H | H | F | F | F | —(CH₂)₃— | |
| I.a.747 | Cl | H | H | F | F | F | —(CH₂)₃— | |
| I.a.748 | F | H | H | Cl | F | F | —(CH₂)₃— | |
| I.a.749 | Cl | H | H | F | F | F | —(CH₂)₃— | |
| I.a.750 | CN | H | H | F | F | F | —(CH₂)₃— | |
| I.a.751 | F | H | H | CN | F | F | —(CH₂)₃— | |
| I.a.752 | CN | H | H | F | F | F | —(CH₂)₃— | |
| I.a.753 | F | H | F | H | F | F | —(CH₂)₃— | |
| I.a.754 | Cl | H | F | H | F | F | —(CH₂)₃— | |
| I.a.755 | CN | H | F | H | F | F | —(CH₂)₃— | |
| I.a.756 | F | F | F | H | F | F | —(CH₂)₃— | |
| I.a.757 | Cl | F | F | H | F | F | —(CH₂)₃— | |
| I.a.758 | F | Cl | F | H | F | F | —(CH₂)₃— | |
| I.a.759 | Cl | F | F | H | F | F | —(CH₂)₃— | |
| I.a.760 | CN | F | F | H | F | F | —(CH₂)₃— | |
| I.a.761 | F | CN | F | H | F | F | —(CH₂)₃— | |
| I.a.762 | CN | F | F | H | F | F | —(CH₂)₃— | |
| I.a.763 | F | F | H | F | F | F | —(CH₂)₃— | |
| I.a.764 | Cl | F | H | F | F | F | —(CH₂)₃— | |
| I.a.765 | F | Cl | H | F | F | F | —(CH₂)₃— | |
| I.a.766 | CN | F | H | F | F | F | —(CH₂)₃— | |
| I.a.767 | F | CN | H | F | F | F | —(CH₂)₃— | |
| I.a.768 | F | F | F | F | F | F | —(CH₂)₃— | |
| I.a.769 | Cl | F | F | F | F | F | —(CH₂)₃— | |
| I.a.770 | F | Cl | F | F | F | F | —(CH₂)₃— | |
| I.a.771 | CN | F | F | F | F | F | —(CH₂)₃— | |
| I.a.772 | F | CN | F | F | F | F | —(CH₂)₃— | |
| I.a.773 | H | F | F | F | F | F | —(CH₂)₃— | |
| I.a.774 | F | F | Br | F | F | F | —(CH₂)₃— | |
| I.a.775 | F | F | C≡CH | F | F | F | —(CH₂)₃— | |
| I.a.776 | CF₃ | Cl | H | H | F | F | —(CH₂)₃— | |
| I.a.777 | F | F | I | F | F | F | —(CH₂)₃— | |
| I.a.778 | F | H | H | H | F | F | —(CH₂)₄— | |
| I.a.779 | Cl | H | H | H | F | F | —(CH₂)₄— | |
| I.a.780 | Br | H | H | H | F | F | —(CH₂)₄— | |
| I.a.781 | CN | H | H | H | F | F | —(CH₂)₄— | |
| I.a.782 | CH₃ | H | H | H | F | F | —(CH₂)₄— | |
| I.a.783 | F | H | H | F | F | F | —(CH₂)₄— | |
| I.a.784 | Cl | H | H | F | F | F | —(CH₂)₄— | |
| I.a.785 | F | H | H | Cl | F | F | —(CH₂)₄— | |
| I.a.786 | Cl | H | H | F | F | F | —(CH₂)₄— | |
| I.a.787 | CN | H | H | F | F | F | —(CH₂)₄— | |
| I.a.788 | F | H | H | CN | F | F | —(CH₂)₄— | |
| I.a.789 | CN | H | H | F | F | F | —(CH₂)₄— | |
| I.a.790 | F | H | F | H | F | F | —(CH₂)₄— | |
| I.a.791 | Cl | H | F | H | F | F | —(CH₂)₄— | |
| I.a.792 | CN | H | F | H | F | F | —(CH₂)₄— | |
| I.a.793 | F | F | F | H | F | F | —(CH₂)₄— | |
| I.a.794 | Cl | F | F | H | F | F | —(CH₂)₄— | |
| I.a.795 | F | Cl | F | H | F | F | —(CH₂)₄— | |
| I.a.796 | Cl | F | F | H | F | F | —(CH₂)₄— | |
| I.a.797 | CN | F | F | H | F | F | —(CH₂)₄— | |
| I.a.798 | F | CN | F | H | F | F | —(CH₂)₄— | |
| I.a.799 | CN | F | F | H | F | F | —(CH₂)₄— | |
| I.a.800 | F | F | H | F | F | F | —(CH₂)₄— | |
| I.a.801 | Cl | F | H | F | F | F | —(CH₂)₄— | |
| I.a.802 | F | Cl | H | F | F | F | —(CH₂)₄— | |
| I.a.803 | CN | F | H | F | F | F | —(CH₂)₄— | |
| I.a.804 | F | CN | H | F | F | F | —(CH₂)₄— | |
| I.a.805 | F | F | F | F | F | F | —(CH₂)₄— | |
| I.a.806 | Cl | F | F | F | F | F | —(CH₂)₄— | |
| I.a.807 | F | Cl | F | F | F | F | —(CH₂)₄— | |
| I.a.808 | CN | F | F | F | F | F | —(CH₂)₄— | |
| I.a.809 | F | CN | F | F | F | F | —(CH₂)₄— | |
| I.a.810 | H | F | F | F | F | F | —(CH₂)₄— | |
| I.a.811 | F | F | Br | F | F | F | —(CH₂)₄— | |
| I.a.812 | F | F | C≡CH | F | F | F | —(CH₂)₄— | |
| I.a.813 | CF₃ | Cl | H | H | F | F | —(CH₂)₄— | |
| I.a.814 | F | F | I | F | F | F | —(CH₂)₄— | |
| I.a.815 | F | H | H | H | F | F | —(CH₂)₅— | |
| I.a.816 | Cl | H | H | H | F | F | —(CH₂)₅— | |
| I.a.817 | Br | H | H | H | F | F | —(CH₂)₅— | |
| I.a.818 | CN | H | H | H | F | F | —(CH₂)₅— | |
| I.a.819 | CH₃ | H | H | H | F | F | —(CH₂)₅— | |
| I.a.820 | F | H | H | F | F | F | —(CH₂)₅— | |
| I.a.821 | Cl | H | H | F | F | F | —(CH₂)₅— | |
| I.a.822 | F | H | H | Cl | F | F | —(CH₂)₅— | |
| I.a.823 | Cl | H | H | F | F | F | —(CH₂)₅— | |
| I.a.824 | CN | H | H | F | F | F | —(CH₂)₅— | |
| I.a.825 | F | H | H | CN | F | F | —(CH₂)₅— | |
| I.a.826 | CN | H | H | F | F | F | —(CH₂)₅— | |
| I.a.827 | F | H | F | H | F | F | —(CH₂)₅— | |
| I.a.828 | Cl | H | F | H | F | F | —(CH₂)₅— | |
| I.a.829 | CN | H | F | H | F | F | —(CH₂)₅— | |
| I.a.830 | F | F | F | H | F | F | —(CH₂)₅— | |
| I.a.831 | Cl | F | F | H | F | F | —(CH₂)₅— | |
| I.a.832 | F | Cl | F | H | F | F | —(CH₂)₅— | |
| I.a.833 | Cl | F | F | H | F | F | —(CH₂)₅— | |
| I.a.834 | CN | F | F | H | F | F | —(CH₂)₅— | |
| I.a.835 | F | CN | F | H | F | F | —(CH₂)₅— | |
| I.a.836 | CN | F | F | H | F | F | —(CH₂)₅— | |
| I.a.837 | F | F | H | F | F | F | —(CH₂)₅— | |
| I.a.838 | Cl | F | H | F | F | F | —(CH₂)₅— | |
| I.a.839 | F | Cl | H | F | F | F | —(CH₂)₅— | |
| I.a.840 | CN | F | H | F | F | F | —(CH₂)₅— | |
| I.a.841 | F | CN | H | F | F | F | —(CH₂)₅— | |
| I.a.842 | F | F | F | F | F | F | —(CH₂)₅— | |
| I.a.843 | Cl | F | F | F | F | F | —(CH₂)₅— | |
| I.a.844 | F | Cl | F | F | F | F | —(CH₂)₅— | |
| I.a.845 | CN | F | F | F | F | F | —(CH₂)₅— | |
| I.a.846 | F | CN | F | F | F | F | —(CH₂)₅— | |
| I.a.847 | H | F | F | F | F | F | —(CH₂)₅— | |
| I.a.848 | F | F | Br | F | F | F | —(CH₂)₅— | |
| I.a.849 | F | F | C≡CH | F | F | F | —(CH₂)₅— | |
| I.a.850 | CF₃ | Cl | H | H | F | F | —(CH₂)₅— | |
| I.a.851 | F | F | I | F | F | F | —(CH₂)₅— | |
| I.a.852 | F | H | H | H | F | Cl | —(CH₂)₂— | |
| I.a.853 | Cl | H | H | H | F | Cl | —(CH₂)₂— | |
| I.a.854 | Br | H | H | H | F | Cl | —(CH₂)₂— | |
| I.a.855 | CN | H | H | H | F | Cl | —(CH₂)₂— | |
| I.a.856 | CH₃ | H | H | H | F | Cl | —(CH₂)₂— | |
| I.a.857 | F | H | H | F | F | Cl | —(CH₂)₂— | |
| I.a.858 | Cl | H | H | F | F | Cl | —(CH₂)₂— | |
| I.a.859 | F | H | H | Cl | F | Cl | —(CH₂)₂— | |
| I.a.860 | Cl | H | H | F | F | Cl | —(CH₂)₂— | |
| I.a.861 | CN | H | H | F | F | Cl | —(CH₂)₂— | |
| I.a.862 | F | H | H | CN | F | Cl | —(CH₂)₂— | |
| I.a.863 | CN | H | H | F | F | Cl | —(CH₂)₂— | |
| I.a.864 | F | H | F | H | F | Cl | —(CH₂)₂— | |
| I.a.865 | Cl | H | F | H | F | Cl | —(CH₂)₂— | |
| I.a.866 | CN | H | F | H | F | Cl | —(CH₂)₂— | |
| I.a.867 | F | F | F | H | F | Cl | —(CH₂)₂— | |
| I.a.868 | Cl | F | F | H | F | Cl | —(CH₂)₂— | |
| I.a.869 | F | Cl | F | H | F | Cl | —(CH₂)₂— | |
| I.a.870 | Cl | F | F | H | F | Cl | —(CH₂)₂— | |
| I.a.871 | CN | F | F | H | F | Cl | —(CH₂)₂— | |
| I.a.872 | F | CN | F | H | F | Cl | —(CH₂)₂— | |
| I.a.873 | CN | F | F | H | F | Cl | —(CH₂)₂— | |
| I.a.874 | F | F | H | F | F | Cl | —(CH₂)₂— | |
| I.a.875 | Cl | F | H | F | F | Cl | —(CH₂)₂— | |
| I.a.876 | F | Cl | H | F | F | Cl | —(CH₂)₂— | |
| I.a.877 | CN | F | H | F | F | Cl | —(CH₂)₂— | |
| I.a.878 | F | CN | H | F | F | Cl | —(CH₂)₂— | |
| I.a.879 | F | F | F | F | F | Cl | —(CH₂)₂— | |
| I.a.880 | Cl | F | F | F | F | Cl | —(CH₂)₂— | |
| I.a.881 | F | Cl | F | F | F | Cl | —(CH₂)₂— | |
| I.a.882 | CN | F | F | F | F | Cl | —(CH₂)₂— | |
| I.a.883 | F | CN | F | F | F | Cl | —(CH₂)₂— | |
| I.a.884 | H | F | F | F | F | Cl | —(CH₂)₂— | |
| I.a.885 | F | F | Br | F | F | Cl | —(CH₂)₂— | |
| I.a.886 | F | F | C≡CH | F | F | Cl | —(CH₂)₂— | |
| I.a.887 | CF₃ | Cl | H | H | F | Cl | —(CH₂)₂— | |
| I.a.888 | F | F | I | F | F | Cl | —(CH₂)₂— | |
| I.a.889 | F | H | H | H | F | Cl | —(CH₂)₃— | |
| I.a.890 | Cl | H | H | H | F | Cl | —(CH₂)₃— | |
| I.a.891 | Br | H | H | H | F | Cl | —(CH₂)₃— | |
| I.a.892 | CN | H | H | H | F | Cl | —(CH₂)₃— | |
| I.a.893 | CH₃ | H | H | H | F | Cl | —(CH₂)₃— | |
| I.a.894 | F | H | H | F | F | Cl | —(CH₂)₃— | |
| I.a.895 | Cl | H | H | F | F | Cl | —(CH₂)₃— | |
| I.a.896 | F | H | H | Cl | F | Cl | —(CH₂)₃— | |
| I.a.897 | Cl | H | H | F | F | Cl | —(CH₂)₃— | |
| I.a.898 | CN | H | H | F | F | Cl | —(CH₂)₃— | |
| I.a.899 | F | H | H | CN | F | Cl | —(CH₂)₃— | |
| I.a.900 | CN | H | H | F | F | Cl | —(CH₂)₃— | |
| I.a.901 | F | H | F | H | F | Cl | —(CH₂)₃— | |
| I.a.902 | Cl | H | F | H | F | Cl | —(CH₂)₃— | |
| I.a.903 | CN | H | F | H | F | Cl | —(CH₂)₃— | |
| I.a.904 | F | F | F | H | F | Cl | —(CH₂)₃— | |
| I.a.905 | Cl | F | F | H | F | Cl | —(CH₂)₃— | |
| I.a.906 | F | Cl | F | H | F | Cl | —(CH₂)₃— | |
| I.a.907 | Cl | F | F | H | F | Cl | —(CH₂)₃— | |
| I.a.908 | CN | F | F | H | F | Cl | —(CH₂)₃— | |
| I.a.909 | F | CN | F | H | F | Cl | —(CH₂)₃— | |
| I.a.910 | CN | F | F | H | F | Cl | —(CH₂)₃— | |
| I.a.911 | F | F | H | F | F | Cl | —(CH₂)₃— | |
| I.a.912 | Cl | F | H | F | F | Cl | —(CH₂)₃— | |
| I.a.913 | F | Cl | H | F | F | Cl | —(CH₂)₃— | |
| I.a.914 | CN | F | H | F | F | Cl | —(CH₂)₃— | |
| I.a.915 | F | CN | H | F | F | Cl | —(CH₂)₃— | |
| I.a.916 | F | F | F | F | F | Cl | —(CH₂)₃— | |
| I.a.917 | Cl | F | F | F | F | Cl | —(CH₂)₃— | |
| I.a.918 | F | Cl | F | F | F | Cl | —(CH₂)₃— | |
| I.a.919 | CN | F | F | F | F | Cl | —(CH₂)₃— | |
| I.a.920 | F | CN | F | F | F | Cl | —(CH₂)₃— | |
| I.a.921 | H | F | F | F | F | Cl | —(CH₂)₃— | |
| I.a.922 | F | F | Br | F | F | Cl | —(CH₂)₃— | |
| I.a.923 | F | F | C≡CH | F | F | Cl | —(CH₂)₃— | |
| I.a.924 | CF₃ | Cl | H | H | F | Cl | —(CH₂)₃— | |
| I.a.925 | F | F | I | F | F | Cl | —(CH₂)₃— | |
| I.a.926 | F | H | H | H | F | Cl | —(CH₂)₄— | |
| I.a.927 | Cl | H | H | H | F | Cl | —(CH₂)₄— | |
| I.a.928 | Br | H | H | H | F | Cl | —(CH₂)₄— | |
| I.a.929 | CN | H | H | H | F | Cl | —(CH₂)₄— | |
| I.a.930 | CH₃ | H | H | H | F | Cl | —(CH₂)₄— | |
| I.a.931 | F | H | H | F | F | Cl | —(CH₂)₄— | |
| I.a.932 | Cl | H | H | F | F | Cl | —(CH₂)₄— | |
| I.a.933 | F | H | H | Cl | F | Cl | —(CH₂)₄— | |
| I.a.934 | Cl | H | H | F | F | Cl | —(CH₂)₄— | |
| I.a.935 | CN | H | H | F | F | Cl | —(CH₂)₄— | |
| I.a.936 | F | H | H | CN | F | Cl | —(CH₂)₄— | |
| I.a.937 | CN | H | H | F | F | Cl | —(CH₂)₄— | |
| I.a.938 | F | H | F | H | F | Cl | —(CH₂)₄— | |
| I.a.939 | Cl | H | F | H | F | Cl | —(CH₂)₄— | |
| I.a.940 | CN | H | F | H | F | Cl | —(CH₂)₄— | |
| I.a.941 | F | F | F | H | F | Cl | —(CH₂)₄— | |
| I.a.942 | Cl | F | F | H | F | Cl | —(CH₂)₄— | |
| I.a.943 | F | Cl | F | H | F | Cl | —(CH₂)₄— | |
| I.a.944 | Cl | F | F | H | F | Cl | —(CH₂)₄— | |
| I.a.945 | CN | F | F | H | F | Cl | —(CH₂)₄— | |
| I.a.946 | F | CN | F | H | F | Cl | —(CH₂)₄— | |
| I.a.947 | CN | F | F | H | F | Cl | —(CH₂)₄— | |
| I.a.948 | F | F | H | F | F | Cl | —(CH₂)₄— | |
| I.a.949 | Cl | F | H | F | F | Cl | —(CH₂)₄— | |
| I.a.950 | F | Cl | H | F | F | Cl | —(CH₂)₄— | |
| I.a.951 | CN | F | H | F | F | Cl | —(CH₂)₄— | |
| I.a.952 | F | CN | H | F | F | Cl | —(CH₂)₄— | |
| I.a.953 | F | F | F | F | F | Cl | —(CH₂)₄— | |
| I.a.954 | Cl | F | F | F | F | Cl | —(CH₂)₄— | |
| I.a.955 | F | Cl | F | F | F | Cl | —(CH₂)₄— | |
| I.a.956 | CN | F | F | F | F | Cl | —(CH₂)₄— | |
| I.a.957 | F | CN | F | F | F | Cl | —(CH₂)₄— | |
| I.a.958 | H | F | F | F | F | Cl | —(CH₂)₄— | |
| I.a.959 | F | F | Br | F | F | Cl | —(CH₂)₄— | |
| I.a.960 | F | F | C≡CH | F | F | Cl | —(CH₂)₄— | |
| I.a.961 | CF₃ | Cl | H | H | F | Cl | —(CH₂)₄— | |
| I.a.962 | F | F | I | F | F | Cl | —(CH₂)₄— | |
| I.a.963 | F | H | H | H | F | Cl | —(CH₂)₅— | |
| I.a.964 | Cl | H | H | H | F | Cl | —(CH₂)₅— | |
| I.a.965 | Br | H | H | H | F | Cl | —(CH₂)₅— | |
| I.a.966 | CN | H | H | H | F | Cl | —(CH₂)₅— | |
| I.a.967 | CH₃ | H | H | H | F | Cl | —(CH₂)₅— | |
| I.a.968 | F | H | H | F | F | Cl | —(CH₂)₅— | |
| I.a.969 | Cl | H | H | F | F | Cl | —(CH₂)₅— | |
| I.a.970 | F | H | H | Cl | F | Cl | —(CH₂)₅— | |
| I.a.971 | Cl | H | H | F | F | Cl | —(CH₂)₅— | |
| I.a.972 | CN | H | H | F | F | Cl | —(CH₂)₅— | |
| I.a.973 | F | H | H | CN | F | Cl | —(CH₂)₅— | |
| I.a.974 | CN | H | H | F | F | Cl | —(CH₂)₅— | |
| I.a.975 | F | H | F | H | F | Cl | —(CH₂)₅— | |
| I.a.976 | Cl | H | F | H | F | Cl | —(CH₂)₅— | |
| I.a.977 | CN | H | F | H | F | Cl | —(CH₂)₅— | |
| I.a.978 | F | F | F | H | F | Cl | —(CH₂)₅— | |
| I.a.979 | Cl | F | F | H | F | Cl | —(CH₂)₅— | |
| I.a.980 | F | Cl | F | H | F | Cl | —(CH₂)₅— | |
| I.a.981 | Cl | F | F | H | F | Cl | —(CH₂)₅— | |
| I.a.982 | CN | F | F | H | F | Cl | —(CH₂)₅— | |
| I.a.983 | F | CN | F | H | F | Cl | —(CH₂)₅— | |
| I.a.984 | CN | F | F | H | F | Cl | —(CH₂)₅— | |
| I.a.985 | F | F | H | F | F | Cl | —(CH₂)₅— | |
| I.a.986 | Cl | F | H | F | F | Cl | —(CH₂)₅— | |
| I.a.987 | F | Cl | H | F | F | Cl | —(CH₂)₅— | |
| I.a.988 | CN | F | H | F | F | Cl | —(CH₂)₅— | |
| I.a.989 | F | CN | H | F | F | Cl | —(CH₂)₅— | |
| I.a.990 | F | F | F | F | F | Cl | —(CH₂)₅— | |
| I.a.991 | Cl | F | F | F | F | Cl | —(CH₂)₅— | |
| I.a.992 | F | Cl | F | F | F | Cl | —(CH₂)₅— | |
| I.a.993 | CN | F | F | F | F | Cl | —(CH₂)₅— | |
| I.a.994 | F | CN | F | F | F | Cl | —(CH₂)₅— | |
| I.a.995 | H | F | F | F | F | Cl | —(CH₂)₅— | |
| I.a.996 | F | F | Br | F | F | Cl | —(CH₂)₅— | |
| I.a.997 | F | F | C≡CH | F | F | Cl | —(CH₂)₅— | |
| I.a.998 | CF₃ | Cl | H | H | F | Cl | —(CH₂)₅— | |
| I.a.999 | F | F | I | F | F | Cl | —(CH₂)₅— | |
| I.a.1000 | F | H | H | H | F | C₂H₅ | CH₃ | H |
| I.a.1001 | Cl | H | H | H | F | C₂H₅ | CH₃ | H |
| I.a.1002 | Br | H | H | H | F | C₂H₅ | CH₃ | H |
| I.a.1003 | CN | H | H | H | F | C₂H₅ | CH₃ | H |
| I.a.1004 | CH₃ | H | H | H | F | C₂H₅ | CH₃ | H |
| I.a.1005 | F | H | H | F | F | C₂H₅ | CH₃ | H |
| I.a.1006 | Cl | H | H | F | F | C₂H₅ | CH₃ | H |
| I.a.1007 | F | H | H | Cl | F | C₂H₅ | CH₃ | H |
| I.a.1008 | Cl | H | H | F | F | C₂H₅ | CH₃ | H |
| I.a.1009 | CN | H | H | F | F | C₂H₅ | CH₃ | H |
| I.a.1010 | F | H | H | CN | F | C₂H₅ | CH₃ | H |
| I.a.1011 | CN | H | H | F | F | C₂H₅ | CH₃ | H |
| I.a.1012 | F | H | F | H | F | C₂H₅ | CH₃ | H |
| I.a.1013 | Cl | H | F | H | F | C₂H₅ | CH₃ | H |
| I.a.1014 | CN | H | F | H | F | C₂H₅ | CH₃ | H |
| I.a.1015 | F | F | F | H | F | C₂H₅ | CH₃ | H |
| I.a.1016 | Cl | F | F | H | F | C₂H₅ | CH₃ | H |
| I.a.1017 | F | Cl | F | H | F | C₂H₅ | CH₃ | H |
| I.a.1018 | Cl | F | F | H | F | C₂H₅ | CH₃ | H |
| I.a.1019 | CN | F | F | H | F | C₂H₅ | CH₃ | H |
| I.a.1020 | F | CN | F | H | F | C₂H₅ | CH₃ | H |
| I.a.1021 | CN | F | F | H | F | C₂H₅ | CH₃ | H |
| I.a.1022 | F | F | H | F | F | C₂H₅ | CH₃ | H |
| I.a.1023 | Cl | F | H | F | F | C₂H₅ | CH₃ | H |
| I.a.1024 | F | Cl | H | F | F | C₂H₅ | CH₃ | H |
| I.a.1025 | CN | F | H | F | F | C₂H₅ | CH₃ | H |
| I.a.1026 | F | CN | H | F | F | C₂H₅ | CH₃ | H |
| I.a.1027 | F | F | F | F | F | C₂H₅ | CH₃ | H |
| I.a.1028 | Cl | F | F | F | F | C₂H₅ | CH₃ | H |
| I.a.1029 | F | Cl | F | F | F | C₂H₅ | CH₃ | H |
| I.a.1030 | CN | F | F | F | F | C₂H₅ | CH₃ | H |
| I.a.1031 | F | CN | F | F | F | C₂H₅ | CH₃ | H |
| I.a.1032 | H | F | F | F | F | C₂H₅ | CH₃ | H |
| I.a.1033 | F | F | Br | F | F | C₂H₅ | CH₃ | H |
| I.a.1034 | F | F | C≡CH | F | F | C₂H₅ | CH₃ | H |
| I.a.1035 | CF₃ | Cl | H | H | F | C₂H₅ | CH₃ | H |
| I.a.1036 | F | F | I | F | F | C₂H₅ | CH₃ | H |
| I.a.1037 | F | H | H | H | F | C₂H₅ | C₂H₅ | H |
| I.a.1038 | Cl | H | H | H | F | C₂H₅ | C₂H₅ | H |
| I.a.1039 | Br | H | H | H | F | C₂H₅ | C₂H₅ | H |
| I.a.1040 | CN | H | H | H | F | C₂H₅ | C₂H₅ | H |
| I.a.1041 | CH₃ | H | H | H | F | C₂H₅ | C₂H₅ | H |
| I.a.1042 | F | H | H | F | F | C₂H₅ | C₂H₅ | H |
| I.a.1043 | Cl | H | H | F | F | C₂H₅ | C₂H₅ | H |
| I.a.1044 | F | H | H | Cl | F | C₂H₅ | C₂H₅ | H |
| I.a.1045 | Cl | H | H | F | F | C₂H₅ | C₂H₅ | H |
| I.a.1046 | CN | H | H | F | F | C₂H₅ | C₂H₅ | H |
| I.a.1047 | F | H | H | CN | F | C₂H₅ | C₂H₅ | H |
| I.a.1048 | CN | H | H | F | F | C₂H₅ | C₂H₅ | H |
| I.a.1049 | F | H | F | H | F | C₂H₅ | C₂H₅ | H |
| I.a.1050 | Cl | H | F | H | F | C₂H₅ | C₂H₅ | H |
| I.a.1051 | CN | H | F | H | F | C₂H₅ | C₂H₅ | H |
| I.a.1052 | F | F | F | H | F | C₂H₅ | C₂H₅ | H |
| I.a.1053 | Cl | F | F | H | F | C₂H₅ | C₂H₅ | H |
| I.a.1054 | F | Cl | F | H | F | C₂H₅ | C₂H₅ | H |
| I.a.1055 | Cl | F | F | H | F | C₂H₅ | C₂H₅ | H |
| I.a.1056 | CN | F | F | H | F | C₂H₅ | C₂H₅ | H |
| I.a.1057 | F | CN | F | H | F | C₂H₅ | C₂H₅ | H |
| I.a.1058 | CN | F | F | H | F | C₂H₅ | C₂H₅ | H |
| I.a.1059 | F | F | H | F | F | C₂H₅ | C₂H₅ | H |
| I.a.1060 | Cl | F | H | F | F | C₂H₅ | C₂H₅ | H |
| I.a.1061 | F | Cl | H | F | F | C₂H₅ | C₂H₅ | H |
| I.a.1062 | CN | F | H | F | F | C₂H₅ | C₂H₅ | H |
| I.a.1063 | F | CN | H | F | F | C₂H₅ | C₂H₅ | H |
| I.a.1064 | F | F | F | F | F | C₂H₅ | C₂H₅ | H |
| I.a.1065 | Cl | F | F | F | F | C₂H₅ | C₂H₅ | H |
| I.a.1066 | F | Cl | F | F | F | C₂H₅ | C₂H₅ | H |
| I.a.1067 | CN | F | F | F | F | C₂H₅ | C₂H₅ | H |
| I.a.1068 | F | CN | F | F | F | C₂H₅ | C₂H₅ | H |
| I.a.1069 | H | F | F | F | F | C₂H₅ | C₂H₅ | H |
| I.a.1070 | F | F | Br | F | F | C₂H₅ | C₂H₅ | H |
| I.a.1071 | F | F | C≡CH | F | F | C₂H₅ | C₂H₅ | H |
| I.a.1072 | CF₃ | Cl | H | H | F | C₂H₅ | C₂H₅ | H |
| I.a.1073 | F | F | I | F | F | C₂H₅ | C₂H₅ | H |
| I.a.1074 | F | H | H | H | F | C₂H₅ | C₂H₅ | CH₃ |
| I.a.1075 | Cl | H | H | H | F | C₂H₅ | C₂H₅ | CH₃ |
| I.a.1076 | Br | H | H | H | F | C₂H₅ | C₂H₅ | CH₃ |
| I.a.1077 | CN | H | H | H | F | C₂H₅ | C₂H₅ | CH₃ |
| I.a.1078 | CH₃ | H | H | H | F | C₂H₅ | C₂H₅ | CH₃ |
| I.a.1079 | F | H | H | F | F | C₂H₅ | C₂H₅ | CH₃ |
| I.a.1080 | Cl | H | H | F | F | C₂H₅ | C₂H₅ | CH₃ |
| I.a.1081 | F | H | H | Cl | F | C₂H₅ | C₂H₅ | CH₃ |
| I.a.1082 | Cl | H | H | F | F | C₂H₅ | C₂H₅ | CH₃ |
| I.a.1083 | CN | H | H | F | F | C₂H₅ | C₂H₅ | CH₃ |
| I.a.1084 | F | H | H | CN | F | C₂H₅ | C₂H₅ | CH₃ |
| I.a.1085 | CN | H | H | F | F | C₂H₅ | C₂H₅ | CH₃ |
| I.a.1086 | F | H | F | H | F | C₂H₅ | C₂H₅ | CH₃ |
| I.a.1087 | Cl | H | F | H | F | C₂H₅ | C₂H₅ | CH₃ |
| I.a.1088 | CN | H | F | H | F | C₂H₅ | C₂H₅ | CH₃ |
| I.a.1089 | F | F | F | H | F | C₂H₅ | C₂H₅ | CH₃ |
| I.a.1090 | Cl | F | F | H | F | C₂H₅ | C₂H₅ | CH₃ |
| I.a.1091 | F | Cl | F | H | F | C₂H₅ | C₂H₅ | CH₃ |
| I.a.1092 | Cl | F | F | H | F | C₂H₅ | C₂H₅ | CH₃ |
| I.a.1093 | CN | F | F | H | F | C₂H₅ | C₂H₅ | CH₃ |
| I.a.1094 | F | CN | F | H | F | C₂H₅ | C₂H₅ | CH₃ |
| I.a.1095 | CN | F | F | H | F | C₂H₅ | C₂H₅ | CH₃ |
| I.a.1096 | F | F | H | F | F | C₂H₅ | C₂H₅ | CH₃ |
| I.a.1097 | Cl | F | H | F | F | C₂H₅ | C₂H₅ | CH₃ |
| I.a.1098 | F | Cl | H | F | F | C₂H₅ | C₂H₅ | CH₃ |
| I.a.1099 | CN | F | H | F | F | C₂H₅ | C₂H₅ | CH₃ |
| I.a.1100 | F | CN | H | F | F | C₂H₅ | C₂H₅ | CH₃ |
| I.a.1101 | F | F | F | F | F | C₂H₅ | C₂H₅ | CH₃ |
| I.a.1102 | Cl | F | F | F | F | C₂H₅ | C₂H₅ | CH₃ |
| I.a.1103 | F | Cl | F | F | F | C₂H₅ | C₂H₅ | CH₃ |
| I.a.1104 | CN | F | F | F | F | C₂H₅ | C₂H₅ | CH₃ |
| I.a.1105 | F | CN | F | F | F | C₂H₅ | C₂H₅ | CH₃ |
| I.a.1106 | H | F | F | F | F | C₂H₅ | C₂H₅ | CH₃ |
| I.a.1107 | F | F | Br | F | F | C₂H₅ | C₂H₅ | CH₃ |
| I.a.1108 | F | F | C≡CH | F | F | C₂H₅ | C₂H₅ | CH₃ |
| I.a.1109 | CF₃ | Cl | H | H | F | C₂H₅ | C₂H₅ | CH₃ |
| I.a.1110 | F | F | I | F | F | C₂H₅ | C₂H₅ | CH₃ |
| I.a.1111 | F | H | H | H | F | C₂H₅ | CH₃ | CH₃ |
| I.a.1112 | Cl | H | H | H | F | C₂H₅ | CH₃ | CH₃ |
| I.a.1113 | Br | H | H | H | F | C₂H₅ | CH₃ | CH₃ |
| I.a.1114 | CN | H | H | H | F | C₂H₅ | CH₃ | CH₃ |
| I.a.1115 | CH₃ | H | H | H | F | C₂H₅ | CH₃ | CH₃ |
| I.a.1116 | F | H | H | F | F | C₂H₅ | CH₃ | CH₃ |
| I.a.1117 | Cl | H | H | F | F | C₂H₅ | CH₃ | CH₃ |
| I.a.1118 | F | H | H | Cl | F | C₂H₅ | CH₃ | CH₃ |
| I.a.1119 | Cl | H | H | F | F | C₂H₅ | CH₃ | CH₃ |
| I.a.1120 | CN | H | H | F | F | C₂H₅ | CH₃ | CH₃ |
| I.a.1121 | F | H | H | CN | F | C₂H₅ | CH₃ | CH₃ |
| I.a.1122 | CN | H | H | F | F | C₂H₅ | CH₃ | CH₃ |
| I.a.1123 | F | H | F | H | F | C₂H₅ | CH₃ | CH₃ |
| I.a.1124 | Cl | H | F | H | F | C₂H₅ | CH₃ | CH₃ |
| I.a.1125 | CN | H | F | H | F | C₂H₅ | CH₃ | CH₃ |
| I.a.1126 | F | F | F | H | F | C₂H₅ | CH₃ | CH₃ |
| I.a.1127 | Cl | F | F | H | F | C₂H₅ | CH₃ | CH₃ |
| I.a.1128 | F | Cl | F | H | F | C₂H₅ | CH₃ | CH₃ |
| I.a.1129 | Cl | F | F | H | F | C₂H₅ | CH₃ | CH₃ |
| I.a.1130 | CN | F | F | H | F | C₂H₅ | CH₃ | CH₃ |
| I.a.1131 | F | CN | F | H | F | C₂H₅ | CH₃ | CH₃ |
| I.a.1132 | CN | F | F | H | F | C₂H₅ | CH₃ | CH₃ |
| I.a.1133 | F | F | H | F | F | C₂H₅ | CH₃ | CH₃ |
| I.a.1134 | Cl | F | H | F | F | C₂H₅ | CH₃ | CH₃ |
| I.a.1135 | F | Cl | H | F | F | C₂H₅ | CH₃ | CH₃ |
| I.a.1136 | CN | F | H | F | F | C₂H₅ | CH₃ | CH₃ |
| I.a.1137 | F | CN | H | F | F | C₂H₅ | CH₃ | CH₃ |
| I.a.1138 | F | F | F | F | F | C₂H₅ | CH₃ | CH₃ |
| I.a.1139 | Cl | F | F | F | F | C₂H₅ | CH₃ | CH₃ |
| I.a.1140 | F | Cl | F | F | F | C₂H₅ | CH₃ | CH₃ |
| I.a.1141 | CN | F | F | F | F | C₂H₅ | CH₃ | CH₃ |
| I.a.1142 | F | CN | F | F | F | C₂H₅ | CH₃ | CH₃ |
| I.a.1143 | H | F | F | F | F | C₂H₅ | CH₃ | CH₃ |
| I.a.1144 | F | F | Br | F | F | C₂H₅ | CH₃ | CH₃ |
| I.a.1145 | F | F | C≡CH | F | F | C₂H₅ | CH₃ | CH₃ |
| I.a.1146 | CF₃ | Cl | H | H | F | C₂H₅ | CH₃ | CH₃ |
| I.a.1147 | F | F | I | F | F | C₂H₅ | CH₃ | CH₃ |
| I.a.1148 | F | H | H | H | F | Cl | CH₃ | H |
| I.a.1149 | Cl | H | H | H | F | Cl | CH₃ | H |
| I.a.1150 | Br | H | H | H | F | Cl | CH₃ | H |
| I.a.1151 | CN | H | H | H | F | Cl | CH₃ | H |
| I.a.1152 | CH₃ | H | H | H | F | Cl | CH₃ | H |
| I.a.1153 | F | H | H | F | F | Cl | CH₃ | H |
| I.a.1154 | Cl | H | H | F | F | Cl | CH₃ | H |
| I.a.1155 | F | H | H | Cl | F | Cl | CH₃ | H |
| I.a.1156 | Cl | H | H | F | F | Cl | CH₃ | H |
| I.a.1157 | CN | H | H | F | F | Cl | CH₃ | H |
| I.a.1158 | F | H | H | CN | F | Cl | CH₃ | H |
| I.a.1159 | CN | H | H | F | F | Cl | CH₃ | H |
| I.a.1160 | F | H | F | H | F | Cl | CH₃ | H |
| I.a.1161 | Cl | H | F | H | F | Cl | CH₃ | H |
| I.a.1162 | CN | H | F | H | F | Cl | CH₃ | H |
| I.a.1163 | F | F | F | H | F | Cl | CH₃ | H |
| I.a.1164 | Cl | F | F | H | F | Cl | CH₃ | H |
| I.a.1165 | F | Cl | F | H | F | Cl | CH₃ | H |
| I.a.1166 | Cl | F | F | H | F | Cl | CH₃ | H |
| I.a.1167 | CN | F | F | H | F | Cl | CH₃ | H |
| I.a.1168 | F | CN | F | H | F | Cl | CH₃ | H |
| I.a.1169 | CN | F | F | H | F | Cl | CH₃ | H |
| I.a.1170 | F | F | H | F | F | Cl | CH₃ | H |
| I.a.1171 | Cl | F | H | F | F | Cl | CH₃ | H |
| I.a.1172 | F | Cl | H | F | F | Cl | CH₃ | H |
| I.a.1173 | CN | F | H | F | F | Cl | CH₃ | H |
| I.a.1174 | F | CN | H | F | F | Cl | CH₃ | H |
| I.a.1175 | F | F | F | F | F | Cl | CH₃ | H |
| I.a.1176 | Cl | F | F | F | F | Cl | CH₃ | H |
| I.a.1177 | F | Cl | F | F | F | Cl | CH₃ | H |
| I.a.1178 | CN | F | F | F | F | Cl | CH₃ | H |
| I.a.1179 | F | CN | F | F | F | Cl | CH₃ | H |
| I.a.1180 | H | F | F | F | F | Cl | CH₃ | H |
| I.a.1181 | F | F | Br | F | F | Cl | CH₃ | H |
| I.a.1182 | F | F | C≡CH | F | F | Cl | CH₃ | H |
| I.a.1183 | CF₃ | Cl | H | H | F | Cl | CH₃ | H |
| I.a.1184 | F | F | I | F | F | Cl | CH₃ | H |
| I.a.1185 | F | H | H | H | F | CH₂Cl | Cl | CH₃ |
| I.a.1186 | Cl | H | H | H | F | CH₂Cl | Cl | CH₃ |
| I.a.1187 | Br | H | H | H | F | CH₂Cl | Cl | CH₃ |
| I.a.1188 | CN | H | H | H | F | CH₂Cl | Cl | CH₃ |
| I.a.1189 | CH₃ | H | H | H | F | CH₂Cl | Cl | CH₃ |
| I.a.1190 | F | H | H | F | F | CH₂Cl | Cl | CH₃ |
| I.a.1191 | Cl | H | H | F | F | CH₂Cl | Cl | CH₃ |
| I.a.1192 | F | H | H | Cl | F | CH₂Cl | Cl | CH₃ |
| I.a.1193 | Cl | H | H | F | F | CH₂Cl | Cl | CH₃ |
| I.a.1194 | CN | H | H | F | F | CH₂Cl | Cl | CH₃ |
| I.a.1195 | F | H | H | CN | F | CH₂Cl | Cl | CH₃ |
| I.a.1196 | CN | H | H | F | F | CH₂Cl | Cl | CH₃ |
| I.a.1197 | F | H | F | H | F | CH₂Cl | Cl | CH₃ |
| I.a.1198 | Cl | H | F | H | F | CH₂Cl | Cl | CH₃ |
| I.a.1199 | CN | H | F | H | F | CH₂Cl | Cl | CH₃ |
| I.a.1200 | F | F | F | H | F | CH₂Cl | Cl | CH₃ |
| I.a.1201 | Cl | F | F | H | F | CH₂Cl | Cl | CH₃ |
| I.a.1202 | F | Cl | F | H | F | CH₂Cl | Cl | CH₃ |
| I.a.1203 | Cl | F | F | H | F | CH₂Cl | Cl | CH₃ |
| I.a.1204 | CN | F | F | H | F | CH₂Cl | Cl | CH₃ |
| I.a.1205 | F | CN | F | H | F | CH₂Cl | Cl | CH₃ |
| I.a.1206 | CN | F | F | H | F | CH₂Cl | Cl | CH₃ |
| I.a.1207 | F | F | H | F | F | CH₂Cl | Cl | CH₃ |
| I.a.1208 | Cl | F | H | F | F | CH₂Cl | Cl | CH₃ |
| I.a.1209 | F | Cl | H | F | F | CH₂Cl | Cl | CH₃ |
| I.a.1210 | CN | F | H | F | F | CH₂Cl | Cl | CH₃ |
| I.a.1211 | F | CN | H | F | F | CH₂Cl | Cl | CH₃ |
| I.a.1212 | F | F | F | F | F | CH₂Cl | Cl | CH₃ |
| I.a.1213 | Cl | F | F | F | F | CH₂Cl | Cl | CH₃ |
| I.a.1214 | F | Cl | F | F | F | CH₂Cl | Cl | CH₃ |
| I.a.1215 | CN | F | F | F | F | CH₂Cl | Cl | CH₃ |
| I.a.1216 | F | CN | F | F | F | CH₂Cl | Cl | CH₃ |
| I.a.1217 | H | F | F | F | F | CH₂Cl | Cl | CH₃ |
| I.a.1218 | F | F | Br | F | F | CH₂Cl | Cl | CH₃ |
| I.a.1219 | F | F | C≡CH | F | F | CH₂Cl | Cl | CH₃ |
| I.a.1220 | CF₃ | Cl | H | H | F | CH₂Cl | Cl | CH₃ |
| I.a.1221 | F | F | I | F | F | CH₂Cl | Cl | CH₃ |
| I.a.1222 | F | H | H | H | F | CN | CH₃ | CH₃ |
| I.a.1223 | Cl | H | H | H | F | CN | CH₃ | CH₃ |
| I.a.1224 | Br | H | H | H | F | CN | CH₃ | CH₃ |
| I.a.1225 | CN | H | H | H | F | CN | CH₃ | CH₃ |
| I.a.1226 | CH₃ | H | H | H | F | CN | CH₃ | CH₃ |
| I.a.1227 | F | H | H | F | F | CN | CH₃ | CH₃ |
| I.a.1228 | Cl | H | H | F | F | CN | CH₃ | CH₃ |
| I.a.1229 | F | H | H | Cl | F | CN | CH₃ | CH₃ |
| I.a.1230 | Cl | H | H | F | F | CN | CH₃ | CH₃ |
| I.a.1231 | CN | H | H | F | F | CN | CH₃ | CH₃ |
| I.a.1232 | F | H | H | CN | F | CN | CH₃ | CH₃ |
| I.a.1233 | CN | H | H | F | F | CN | CH₃ | CH₃ |
| I.a.1234 | F | H | F | H | F | CN | CH₃ | CH₃ |
| I.a.1235 | Cl | H | F | H | F | CN | CH₃ | CH₃ |
| I.a.1236 | CN | H | F | H | F | CN | CH₃ | CH₃ |
| I.a.1237 | F | F | F | H | F | CN | CH₃ | CH₃ |
| I.a.1238 | Cl | F | F | H | F | CN | CH₃ | CH₃ |
| I.a.1239 | F | Cl | F | H | F | CN | CH₃ | CH₃ |
| I.a.1240 | Cl | F | F | H | F | CN | CH₃ | CH₃ |
| I.a.1241 | CN | F | F | H | F | CN | CH₃ | CH₃ |
| I.a.1242 | F | CN | F | H | F | CN | CH₃ | CH₃ |
| I.a.1243 | CN | F | F | H | F | CN | CH₃ | CH₃ |
| I.a.1244 | F | F | H | F | F | CN | CH₃ | CH₃ |
| I.a.1245 | Cl | F | H | F | F | CN | CH₃ | CH₃ |
| I.a.1246 | F | Cl | H | F | F | CN | CH₃ | CH₃ |
| I.a.1247 | CN | F | H | F | F | CN | CH₃ | CH₃ |
| I.a.1248 | F | CN | H | F | F | CN | CH₃ | CH₃ |
| I.a.1249 | F | F | F | F | F | CN | CH₃ | CH₃ |
| I.a.1250 | Cl | F | F | F | F | CN | CH₃ | CH₃ |
| I.a.1251 | F | Cl | F | F | F | CN | CH₃ | CH₃ |
| I.a.1252 | CN | F | F | F | F | CN | CH₃ | CH₃ |
| I.a.1253 | F | CN | F | F | F | CN | CH₃ | CH₃ |
| I.a.1254 | H | F | F | F | F | CN | CH₃ | CH₃ |
| I.a.1255 | F | F | Br | F | F | CN | CH₃ | CH₃ |
| I.a.1256 | F | F | C≡CH | F | F | CN | CH₃ | CH₃ |
| I.a.1257 | CF₃ | Cl | H | H | F | CN | CH₃ | CH₃ |
| I.a.1258 | F | F | I | F | F | CN | CH₃ | CH₃ |
| I.a.1259 | F | H | H | H | F | OCH₃ | H | H |
| I.a.1260 | Cl | H | H | H | F | OCH₃ | H | H |
| I.a.1261 | Br | H | H | H | F | OCH₃ | H | H |
| I.a.1262 | CN | H | H | H | F | OCH₃ | H | H |
| I.a.1263 | CH₃ | H | H | H | F | OCH₃ | H | H |
| I.a.1264 | F | H | H | F | F | OCH₃ | H | H |
| I.a.1265 | Cl | H | H | F | F | OCH₃ | H | H |
| I.a.1266 | F | H | H | Cl | F | OCH₃ | H | H |
| I.a.1267 | Cl | H | H | F | F | OCH₃ | H | H |
| I.a.1268 | CN | H | H | F | F | OCH₃ | H | H |
| I.a.1269 | F | H | H | CN | F | OCH₃ | H | H |
| I.a.1270 | CN | H | H | F | F | OCH₃ | H | H |
| I.a.1271 | F | H | F | H | F | OCH₃ | H | H |
| I.a.1272 | Cl | H | F | H | F | OCH₃ | H | H |
| I.a.1273 | CN | H | F | H | F | OCH₃ | H | H |
| I.a.1274 | F | F | F | H | F | OCH₃ | H | H |
| I.a.1275 | Cl | F | F | H | F | OCH₃ | H | H |
| I.a.1276 | F | Cl | F | H | F | OCH₃ | H | H |
| I.a.1277 | Cl | F | F | H | F | OCH₃ | H | H |
| I.a.1278 | CN | F | F | H | F | OCH₃ | H | H |
| I.a.1279 | F | CN | F | H | F | OCH₃ | H | H |
| I.a.1280 | CN | F | F | H | F | OCH₃ | H | H |
| I.a.1281 | F | F | H | F | F | OCH₃ | H | H |
| I.a.1282 | Cl | F | H | F | F | OCH₃ | H | H |
| I.a.1283 | F | Cl | H | F | F | OCH₃ | H | H |
| I.a.1284 | CN | F | H | F | F | OCH₃ | H | H |
| I.a.1285 | F | CN | H | F | F | OCH₃ | H | H |
| I.a.1286 | F | F | F | F | F | OCH₃ | H | H |
| I.a.1287 | Cl | F | F | F | F | OCH₃ | H | H |
| I.a.1288 | F | Cl | F | F | F | OCH₃ | H | H |
| I.a.1289 | CN | F | F | F | F | OCH₃ | H | H |
| I.a.1290 | F | CN | F | F | F | OCH₃ | H | H |
| I.a.1291 | H | F | F | F | F | OCH₃ | H | H |
| I.a.1292 | F | F | Br | F | F | OCH₃ | H | H |
| I.a.1293 | F | F | C≡CH | F | F | OCH₃ | H | H |
| I.a.1294 | CF₃ | Cl | H | H | F | OCH₃ | H | H |
| I.a.1295 | F | F | I | F | F | OCH₃ | H | H |
| I.a.1296 | F | H | H | H | F | OCH₃ | CH₃ | H |
| I.a.1297 | Cl | H | H | H | F | OCH₃ | CH₃ | H |
| I.a.1298 | Br | H | H | H | F | OCH₃ | CH₃ | H |
| I.a.1299 | CN | H | H | H | F | OCH₃ | CH₃ | H |
| I.a.1300 | CH₃ | H | H | H | F | OCH₃ | CH₃ | H |
| I.a.1301 | F | H | H | F | F | OCH₃ | CH₃ | H |
| I.a.1302 | Cl | H | H | F | F | OCH₃ | CH₃ | H |
| I.a.1303 | F | H | H | Cl | F | OCH₃ | CH₃ | H |
| I.a.1304 | Cl | H | H | F | F | OCH₃ | CH₃ | H |
| I.a.1305 | CN | H | H | F | F | OCH₃ | CH₃ | H |
| I.a.1306 | F | H | H | CN | F | OCH₃ | CH₃ | H |
| I.a.1307 | CN | H | H | F | F | OCH₃ | CH₃ | H |
| I.a.1308 | F | H | F | H | F | OCH₃ | CH₃ | H |
| I.a.1309 | Cl | H | F | H | F | OCH₃ | CH₃ | H |
| I.a.1310 | CN | H | F | H | F | OCH₃ | CH₃ | H |
| I.a.1311 | F | F | F | H | F | OCH₃ | CH₃ | H |
| I.a.1312 | Cl | F | F | H | F | OCH₃ | CH₃ | H |
| I.a.1313 | F | Cl | F | H | F | OCH₃ | CH₃ | H |
| I.a.1314 | Cl | F | F | H | F | OCH₃ | CH₃ | H |
| I.a.1315 | CN | F | F | H | F | OCH₃ | CH₃ | H |
| I.a.1316 | F | CN | F | H | F | OCH₃ | CH₃ | H |
| I.a.1317 | CN | F | F | H | F | OCH₃ | CH₃ | H |
| I.a.1318 | F | F | H | F | F | OCH₃ | CH₃ | H |
| I.a.1319 | Cl | F | H | F | F | OCH₃ | CH₃ | H |
| I.a.1320 | F | Cl | H | F | F | OCH₃ | CH₃ | H |
| I.a.1321 | CN | F | H | F | F | OCH₃ | CH₃ | H |
| I.a.1322 | F | CN | H | F | F | OCH₃ | CH₃ | H |
| I.a.1323 | F | F | F | F | F | OCH₃ | CH₃ | H |
| I.a.1324 | Cl | F | F | F | F | OCH₃ | CH₃ | H |
| I.a.1325 | F | Cl | F | F | F | OCH₃ | CH₃ | H |
| I.a.1326 | CN | F | F | F | F | OCH₃ | CH₃ | H |
| I.a.1327 | F | CN | F | F | F | OCH₃ | CH₃ | H |
| I.a.1328 | H | F | F | F | F | OCH₃ | CH₃ | H |
| I.a.1329 | F | F | Br | F | F | OCH₃ | CH₃ | H |
| I.a.1330 | F | F | C≡CH | F | F | OCH₃ | CH₃ | H |
| I.a.1331 | CF₃ | Cl | H | H | F | OCH₃ | CH₃ | H |
| I.a.1332 | F | F | I | F | F | OCH₃ | CH₃ | H |
| I.a.1333 | F | H | H | H | F | OCH₃ | CH₃ | CH₃ |
| I.a.1334 | Cl | H | H | H | F | OCH₃ | CH₃ | CH₃ |
| I.a.1335 | Br | H | H | H | F | OCH₃ | CH₃ | CH₃ |
| I.a.1336 | CN | H | H | H | F | OCH₃ | CH₃ | CH₃ |
| I.a.1337 | CH₃ | H | H | H | F | OCH₃ | CH₃ | CH₃ |
| I.a.1338 | F | H | H | F | F | OCH₃ | CH₃ | CH₃ |
| I.a.1339 | Cl | H | H | F | F | OCH₃ | CH₃ | CH₃ |
| I.a.1340 | F | H | H | Cl | F | OCH₃ | CH₃ | CH₃ |
| I.a.1341 | Cl | H | H | F | F | OCH₃ | CH₃ | CH₃ |
| I.a.1342 | CN | H | H | F | F | OCH₃ | CH₃ | CH₃ |
| I.a.1343 | F | H | H | CN | F | OCH₃ | CH₃ | CH₃ |
| I.a.1344 | CN | H | H | F | F | OCH₃ | CH₃ | CH₃ |
| I.a.1345 | F | H | F | H | F | OCH₃ | CH₃ | CH₃ |
| I.a.1346 | Cl | H | F | H | F | OCH₃ | CH₃ | CH₃ |
| I.a.1347 | CN | H | F | H | F | OCH₃ | CH₃ | CH₃ |
| I.a.1348 | F | F | F | H | F | OCH₃ | CH₃ | CH₃ |
| I.a.1349 | Cl | F | F | H | F | OCH₃ | CH₃ | CH₃ |
| I.a.1350 | F | Cl | F | H | F | OCH₃ | CH₃ | CH₃ |
| I.a.1351 | Cl | F | F | H | F | OCH₃ | CH₃ | CH₃ |
| I.a.1352 | CN | F | F | H | F | OCH₃ | CH₃ | CH₃ |
| I.a.1353 | F | CN | F | H | F | OCH₃ | CH₃ | CH₃ |
| I.a.1354 | CN | F | F | H | F | OCH₃ | CH₃ | CH₃ |
| I.a.1355 | F | F | H | F | F | OCH₃ | CH₃ | CH₃ |
| I.a.1356 | Cl | F | H | F | F | OCH₃ | CH₃ | CH₃ |
| I.a.1357 | F | Cl | H | F | F | OCH₃ | CH₃ | CH₃ |
| I.a.1358 | CN | F | H | F | F | OCH₃ | CH₃ | CH₃ |
| I.a.1359 | F | CN | H | F | F | OCH₃ | CH₃ | CH₃ |
| I.a.1360 | F | F | F | F | F | OCH₃ | CH₃ | CH₃ |
| I.a.1361 | Cl | F | F | F | F | OCH₃ | CH₃ | CH₃ |
| I.a.1362 | F | Cl | F | F | F | OCH₃ | CH₃ | CH₃ |
| I.a.1363 | CN | F | F | F | F | OCH₃ | CH₃ | CH₃ |
| I.a.1364 | F | CN | F | F | F | OCH₃ | CH₃ | CH₃ |
| I.a.1365 | H | F | F | F | F | OCH₃ | CH₃ | CH₃ |
| I.a.1366 | F | F | Br | F | F | OCH₃ | CH₃ | CH₃ |
| I.a.1367 | F | F | C≡CH | F | F | OCH₃ | CH₃ | CH₃ |
| I.a.1368 | CF₃ | Cl | H | H | F | OCH₃ | CH₃ | CH₃ |
| I.a.1369 | F | F | I | F | F | OCH₃ | CH₃ | Ch₃ |

| | | | | | | | |
|---|---|---|---|---|---|---|---|
| I.a.1370 | F | H | H | H | F | H | —O(CH₂)₃— |
| I.a.1371 | Cl | H | H | H | F | H | —O(CH₂)₃— |
| I.a.1372 | Br | H | H | H | F | H | —O(CH₂)₃— |
| I.a.1373 | CN | H | H | H | F | H | —O(CH₂)₃— |
| I.a.1374 | CH₃ | H | H | H | F | H | —O(CH₂)₃— |
| I.a.1375 | F | H | H | F | F | H | —O(CH₂)₃— |
| I.a.1376 | Cl | H | H | F | F | H | —O(CH₂)₃— |
| I.a.1377 | F | H | H | Cl | F | H | —O(CH₂)₃— |
| I.a.1378 | Cl | H | H | F | F | H | —O(CH₂)₃— |
| I.a.1379 | CN | H | H | F | F | H | —O(CH₂)₃— |
| I.a.1380 | F | H | H | CN | F | H | —O(CH₂)₃— |
| I.a.1381 | CN | H | H | F | F | H | —O(CH₂)₃— |
| I.a.1382 | F | H | F | H | F | H | —O(CH₂)₃— |
| I.a.1383 | Cl | H | F | H | F | H | —O(CH₂)₃— |
| I.a.1384 | CN | H | F | H | F | H | —O(CH₂)₃— |
| I.a.1385 | F | F | F | H | F | H | —O(CH₂)₃— |
| I.a.1386 | Cl | F | F | H | F | H | —O(CH₂)₃— |
| I.a.1387 | F | Cl | F | H | F | H | —O(CH₂)₃— |
| I.a.1388 | Cl | F | F | H | F | H | —O(CH₂)₃— |
| I.a.1389 | CN | F | F | H | F | H | —O(CH₂)₃— |
| I.a.1390 | F | CN | F | H | F | H | —O(CH₂)₃— |
| I.a.1391 | CN | F | F | H | F | H | —O(CH₂)₃— |
| I.a.1392 | F | F | H | F | F | H | —O(CH₂)₃— |
| I.a.1393 | Cl | F | H | F | F | H | —O(CH₂)₃— |
| I.a.1394 | F | Cl | H | F | F | H | —O(CH₂)₃— |
| I.a.1395 | CN | F | H | F | F | H | —O(CH₂)₃— |
| I.a.1396 | F | CN | H | F | F | H | —O(CH₂)₃— |
| I.a.1397 | F | F | F | F | F | H | —O(CH₂)₃— |
| I.a.1398 | Cl | F | F | F | F | H | —O(CH₂)₃— |
| I.a.1399 | F | Cl | F | F | F | H | —O(CH₂)₃— |
| I.a.1400 | CN | F | F | F | F | H | —O(CH₂)₃— |
| I.a.1401 | F | CN | F | F | F | H | —O(CH₂)₃— |
| I.a.1402 | H | F | F | F | F | H | —O(CH₂)₃— |
| I.a.1403 | F | F | Br | F | F | H | —O(CH₂)₃— |
| I.a.1404 | F | F | C≡CH | F | F | H | —O(CH₂)₃— |
| I.a.1405 | CF₃ | Cl | H | H | F | H | —O(CH₂)₃— |
| I.a.1406 | F | F | I | F | F | H | —O(CH₂)₃— |

[0811] In another preferred embodiment, the azines useful for the present invention are azines of formula (I)

[chemical structure]

[0812] wherein
[0813] A is heteroaryl, which is substituted by 1, 2, 3, 4, 5 or 6 substituents R^{A} selected from the group consisting of halogen, OH, CN, amino, NO₂, C₁-C₆-alkyl, C₂-C₆-alkenyl, C₂-C₆-alkynyl, C₁-C₆-alkoxy, C₂-C₆-alkenyloxy, C₂-C₆-alkynyloxy, (C₁-C₆-alkoxy)-C₁-C₆-alkyl, (C₁-C₆-alkoxy)-C₁-C₆-alkoxy, (C₁-C₆-alkoxy)-C₂-C₆-alkenyl, (C₁-C₆-alkoxy)-C₂-C₆-alkynyl, C₁-C₆-alkylthio, (C₁-C₆-alkyl)sulfinyl, (C₁-C₆-alkyl)sulfonyl, (C₁-C₆-alkyl)amino, di(C₁-C₆-alkyl)amino, (C₁-C₆-alkyl)-carbonyl, (C₁-C₆-alkoxy)-carbonyl, (C₁-C₆-alkyl)-carbonyloxy, C₃-C₆-cycloalkyl, C₃-C₆-cycloalkoxy, (C₃-C₆-cycloalkyl)-C₁-C₄-alkyl, (C₃-C₆-cycloalkyl)-C₁-C₄-alkoxy, where the aliphatic and cycloaliphatic parts of the 22 aforementioned radicals are unsubstituted, partly or completely halogenated and where the cycloaliphatic parts of the last 4 mentioned radicals may carry 1, 2, 3, 4, 5 or 6 methyl groups;
[0814] R¹ is selected from the group consisting of H, OH, S(O)₂NH₂, CN, C₁-C₆-alkyl, C₂-C₆-alkenyl, C₂-C₆-alkynyl, (C₃-C₆-cycloalkyl)-C₁-C₄-alkyl, C₁-C₆-alkoxy, (C₁-C₆-alkoxy)-C₁-C₆-alkyl, (C₁-C₆-alkyl)-carbonyl, (C₁-C₆-alkoxy)carbonyl, (C₁-C₆-alkyl)sulfonyl, (C₁-C₆-alkylamino)carbonyl, di(C₁-C₆-alkyl)aminocarbonyl, (C₁-C₆-alkylamino)sulfonyl, di(C₁-C₆-alkyl)aminosulfonyl and (C₁-C₆-alkoxy)sulfonyl, where the aliphatic and cycloaliphatic parts of the 14 aforementioned radicals are unsubstituted, partly or completely halogenated,
   [0815] phenyl, phenyl-C₁-C₆-alkyl, phenylsulfonyl, phenylaminosulfonyl, phenylcarbonyl and phenoxycarbonyl,
   [0816] wherein phenyl in the last 6 mentioned radicals are unsubstituted or substituted by 1, 2, 3, 4 or 5 identical or different substituents selected from the group consisting of halogen, CN, NO₂, C₁-C₆-alkyl, C₁-C₆-haloalkyl, C₁-C₆-alkoxy and C₁-C₆-haloalkoxy;
[0817] R² is H, halogen, OH, CN, C₁-C₆-alkyl, C₂-C₆-alkenyl, C₃-C₆-alkynyl, (C₁-C₆-alkoxy)-C₁-C₆-alkyl, C₃-C₆-cycloalkyl, C₃-C₆-cycloalkenyl, (C₃-C₆-cycloalkyl)-C₁-C₄-alkyl, C₁-C₆-alkoxy, C₂-C₆-alkenyloxy, C₂-C₆-alkynyloxy, C₃-C₆-cycloalkoxy or (C₃-C₆-cycloalkyl)-C₁-C₄-alkoxy, where the aliphatic and cycloaliphatic parts of the 9 aforementioned radicals are unsubstituted, partly or completely halogenated,
   [0818] phenyl, phenyl-C₁-C₆-alkyl,
   [0819] wherein phenyl in the last 2 mentioned radicals are unsubstituted or substituted by 1, 2, 3, 4 or 5 identical or different substituents selected from the group consisting of halogen, CN, NO₂, C₁-C₆-alkyl, C₁-C₆-haloalkyl, C₁-C₆-alkoxy and C₁-C₆-haloalkoxy;
[0820] R³ is selected from the group consisting of H, halogen, CN, C₁-C₆-alkyl, C₁-C₆-haloalkyl, C₁-C₆-alkoxy and C₁-C₆-haloalkoxy;
[0821] R⁴ is selected from the group consisting of H, halogen, CN, C₁-C₆-alkyl, C₂-C₆-alkenyl, C₃-C₆-alkynyl, C₃-C₆-cycloalkyl, (C₃-C₆-cycloalkyl)-C₁-C₄-alkyl, C₃-C₆-cycloalkenyl and C₁-C₆-alkoxy-C₁-C₆-alkyl, where the aliphatic and cycloaliphatic parts of the 7 aforementioned radicals are unsubstituted, partly or completely halogenated; or
[0822] R³ and R⁴ together with the carbon atom to which they are attached form a moiety selected from the group consisting of carbonyl, C₂-C₆-alkenyl, C₃-C₆-cycloalkyl, C₃-C₆-cycloalkenyl and three- to six-membered heterocyclyl,
   [0823] wherein the C₃-C₆-cycloalkyl, C₃-C₆-cycloalkenyl, or three- to six-membered heterocyclyl is unsubstituted or substituted by one to three substituents selected from halogen, CN, C₁-C₆-alkyl and C₁-C₆-alkoxy; and
[0824] R⁵ is selected from the group consisting of H, OH, S(O)₂NH₂, CN, C₁-C₆-alkyl, C₂-C₆-alkenyl, C₂-C₆-alkynyl, (C₃-C₆-cycloalkyl)-C₁-C₄-alkyl, C₁-C₆-alkoxy, (C₁-C₆-alkoxy)-C₁-C₆-alkyl, (C₁-C₆-alkyl)-carbonyl, (C₁-C₆-alkoxy)carbonyl, (C₁-C₆-alkyl)sulfonyl, (C₁-C₆-alkylamino)carbonyl, di(C₁-C₆-alkyl)aminocarbonyl, (C₁-C₆-alkylamino)sulfonyl, di(C₁-C₆-alkyl)aminosulfonyl and (C₁-C₆-alkoxy)sulfonyl, where the aliphatic and cycloaliphatic parts of the 14 aforementioned radicals are unsubstituted, partly or completely halogenated,
   [0825] phenyl, phenyl-C₁-C₆-alkyl, phenylsulfonyl, phenylaminosulfonyl, phenylcarbonyl and phenoxycarbonyl,
   [0826] wherein phenyl in the last 6 mentioned radicals are unsubstituted or substituted by 1, 2, 3, 4 or 5 identical or different substituents selected from the group consisting of halogen, CN, NO₂, C₁-C₆-alkyl, C₁-C₆-haloalkyl, C₁-C₆-alkoxy and C₁-C₆-haloalkoxy;

[0827] and wherein the variables A, R¹, R², R³, R⁴ and R⁵ are in particular:
[0828] A is heteroaryl, which is substituted by 1, 2, 3, 4, 5 or 6 substituents R^{A} selected from the group consisting of halogen, OH, CN, amino, NO₂, C₁-C₆-alkyl, C₂-C₆-alkenyl, C₂-C₆-alkynyl, C₁-C₆-alkoxy, C₂-C₆-alkenyloxy, C₂-C₆-alkynyloxy, (C₁-C₆-alkoxy)-C₁-C₆-alkyl, (C₁-C₆-alkoxy)-C₁-C₆-alkoxy, (C₁-C₆-alkoxy)-C₂-C₆-alkenyl, (C₁-C₆-alkoxy)-C₂-C₆-alkynyl, C₁-C₆-alkylthio, (C₁-C₆-alkyl)sulfinyl, (C₁-C₆-alkyl)sulfonyl, (C₁-C₆-alkyl)amino, di(C₁-C₆-alkyl)amino, (C₁-C₆-alkyl)-carbonyl, (C₁-C₆-alkoxy)-carbonyl, (C₁-C₆-alkyl)-carbonyloxy, C₃-C₆-cycloalkyl, C₃-C₆-cycloalkoxy, (C₃-C₆-cycloalkyl)-C₁-C₄-alkyl, (C₃-C₆-cycloalkyl)-C₁-C₄-alkoxy, where the aliphatic and cycloaliphatic parts of the 22 aforementioned radicals are unsubstituted, partly or completely halogenated and where the cycloaliphatic parts of the last 4 mentioned radicals may carry 1, 2, 3, 4, 5 or 6 methyl groups;
[0829] R¹ is selected from the group consisting of H, OH, S(O)₂NH₂, CN, C₁-C₆-alkyl, C₂-C₆-alkenyl, C₂-C₆-alkynyl, (C₃-C₆-cycloalkyl)-C₁-C₄-alkyl, C₁-C₆-alkoxy, (C₁-C₆-alkoxy)-C₁-C₆-alkyl, (C₁-C₆-alkyl)-carbonyl, (C₁-C₆-alkoxy)carbonyl, (C₁-C₆-alkyl)sulfonyl, (C₁-C₆-alkylamino)carbonyl, di(C₁-C₆-alkyl)aminocarbonyl, (C₁-C₆-alkylamino)sulfonyl, di(C₁-C₆-alkyl)aminosulfonyl and (C₁-C₆-alkoxy)sulfonyl, where the aliphatic and cycloaliphatic parts of the 14 aforementioned radicals are unsubstituted, partly or completely halogenated,
   [0830] phenyl, phenyl-C₁-C₆-alkyl, phenylsulfonyl, phenylaminosulfonyl, phenylcarbonyl and phenoxycarbonyl,
   [0831] wherein phenyl in the last 6 mentioned radicals are unsubstituted or substituted by 1, 2, 3, 4 or 5 identical or different substituents selected from the group consisting of halogen, CN, NO₂, C₁-C₆-alkyl, C₁-C₆-haloalkyl, C₁-C₆-alkoxy and C₁-C₆-haloalkoxy;
[0832] R² is H, halogen, OH, CN, C₁-C₆-alkyl, C₂-C₆-alkenyl, C₃-C₆-alkynyl, (C₁-C₆-alkoxy)-C₁-C₆-alkyl, C₃-C₆-cycloalkyl, C₃-C₆-cycloalkenyl, (C₃-C₆-cycloalkyl)-C₁-C₄-alkyl, C₁-C₆-alkoxy, C₂-C₆-alkenyloxy, C₂-C₆-alkynyloxy, C₃-C₆-cycloalkoxy or (C₃-C₆-cycloalkyl)-C₁-C₄-alkoxy, where the aliphatic and cycloaliphatic parts of the 9 aforementioned radicals are unsubstituted, partly or completely halogenated or phenyl, wherein phenyl is unsubstituted or substituted by 1, 2, 3, 4 or 5 identical or different substituents selected from the group consisting of halogen, CN, NO₂, C₁-C₆-alkyl, C₁-C₆-haloalkyl, C₁-C₆-alkoxy and C₁-C₆-haloalkoxy;
   [0833] R³ is selected from the group consisting of H, halogen, CN, C₁-C₆-alkyl, C₁-C₆-haloalkyl, C₁-C₆-alkoxy and C₁-C₆-haloalkoxy;
   [0834] R⁴ is selected from the group consisting of H, halogen, CN, C₁-C₆-alkyl, C₂-C₆-alkenyl, C₃-C₆-alkynyl, C₃-C₆-cycloalkyl, (C₃-C₆-cycloalkyl)-C₁-C₄-alkyl, C₃-C₆-cycloalkenyl and C₁-C₆-alkoxy-C₁-C₆-alkyl, where the aliphatic and cycloaliphatic parts of the 7 aforementioned radicals are unsubstituted, partly or completely halogenated; or
   [0835] R³ and R⁴ together with the carbon atom to which they are attached form a moiety selected from the group consisting of carbonyl, C₂-C₆-alkenyl, C₃-C₆-cycloalkyl, C₃-C₆-cycloalkenyl and three- to six-membered heterocyclyl,
   [0836] wherein the C₃-C₆-cycloalkyl, C₃-C₆-cycloalkenyl, or three- to six-membered heterocyclyl is unsubstituted or substituted by one to three substituents selected from halogen, CN, C₁-C₆-alkyl and C₁-C₆-alkoxy; and
   [0837] R⁵ is selected from the group consisting of H, OH, S(O)₂NH₂, CN, C₁-C₆-alkyl, C₂-C₆-alkenyl, C₂-C₆-alkynyl, (C₃-C₆-cycloalkyl)-C₁-C₄-alkyl, C₁-C₆-alkoxy, (C₁-C₆-alkoxy)-C₁-C₆-alkyl, (C₁-C₆-alkyl)-carbonyl, (C₁-C₆-alkoxy)carbonyl, (C₁-C₆-alkyl)sulfonyl, (C₁-C₆-alkylamino)carbonyl, di(C₁-C₆-alkyl)aminocarbonyl, (C₁-C₆-alkylamino)sulfonyl, di(C₁-C₆-alkyl)aminosulfonyl and (C₁-C₆-alkoxy)sulfonyl, where the aliphatic and cycloaliphatic parts of the 14 aforementioned radicals are unsubstituted, partly or completely halogenated,
   [0838] phenyl, phenyl-C₁-C₆-alkyl, phenylsulfonyl, phenylaminosulfonyl, phenylcarbonyl and phenoxycarbonyl,
   [0839] wherein phenyl in the last 6 mentioned radicals are unsubstituted or substituted by 1, 2, 3, 4 or 5 identical or different substituents selected from the group consisting of halogen, CN, NO₂, C₁-C₆-alkyl, C₁-C₆-haloalkyl, C₁-C₆-alkoxy and C₁-C₆-haloalkoxy;

[0840] and wherein the variables A, R¹, R², R³, R⁴ and R⁵ are in more particular:
[0841] A is heteroaryl, which is substituted by 1, 2, 3, 4, 5 or 6 substituents R^{A} selected from the group consisting of halogen, OH, CN, amino, NO₂, C₁-C₆-alkyl, C₂-C₆-alkenyl, C₂-C₆-alkynyl, C₁-C₆-alkoxy, C₂-C₆-alkenyloxy, C₂-C₆-alkynyloxy, (C₁-C₆-alkoxy)-C₁-C₆-alkyl, (C₁-C₆-alkoxy)-C₁-C₆-alkoxy, (C₁-C₆-alkoxy)-C₂-C₆-alkenyl, (C₁-C₆-alkoxy)-C₂-C₆-alkynyl, C₁-C₆-alkylthio, (C₁-C₆-alkyl)sulfinyl, (C₁-C₆-alkyl)sulfonyl, (C₁-C₆-alkyl)amino, di(C₁-C₆-alkyl)amino, (C₁-C₆-alkyl)-carbonyl, (C₁-C₆-alkoxy)-carbonyl, (C₁-C₆-alkyl)-carbonyloxy, C₃-C₆-cycloalkyl, C₃-C₆-cycloalkoxy, (C₃-C₆-cycloalkyl)-C₁-C₄-alkyl, (C₃-C₆-cycloalkyl)-C₁-C₄-alkoxy, where the aliphatic and cycloaliphatic parts of the 22 aforementioned radicals are unsubstituted, partly or completely halogenated and where the cycloaliphatic parts of the last 4 mentioned radicals may carry 1, 2, 3, 4, 5 or 6 methyl groups;
[0842] R¹ is selected from the group consisting of H, OH, S(O)₂NH₂, CN, C₁-C₆-alkyl, C₂-C₆-alkenyl, C₂-C₆-alkynyl, (C₃-C₆-cycloalkyl)-C₁-C₄-alkyl, C₁-C₆-alkoxy, (C₁-C₆-alkoxy)-C₁-C₆-alkyl, (C₁-C₆-alkyl)-carbonyl, (C₁-C₆-alkoxy)carbonyl, (C₁-C₆-alkyl)sulfonyl, (C₁-C₆-alkylamino)carbonyl, di(C₁-C₆-alkyl)aminocarbonyl, (C₁-C₆-alkylamino)sulfonyl, di(C₁-C₆-alkyl)aminosulfonyl and (C₁-C₆-alkoxy)sulfonyl, where the aliphatic and cycloaliphatic parts of the 14 aforementioned radicals are unsubstituted, partly or completely halogenated,
[0843] phenyl, phenyl-C₁-C₆-alkyl, phenylsulfonyl, phenylaminosulfonyl, phenylcarbonyl and phenoxycarbonyl,
[0844] wherein phenyl in the last 6 mentioned radicals are unsubstituted or substituted by 1, 2, 3, 4 or 5 identical or different substituents selected from the group consisting of halogen, CN, NO₂, C₁-C₆-alkyl, C₁-C₆-haloalkyl, C₁-C₆-alkoxy and C₁-C₆-haloalkoxy;
[0845] R² is H, halogen, OH, CN, C₁-C₆-alkyl, C₂-C₆-alkenyl, C₃-C₆-alkynyl, (C₁-C₆-alkoxy)-C₁-C₆-alkyl, C₃-C₆-cycloalkyl, C₃-C₆-cycloalkenyl, (C₃-C₆-cycloalkyl)-C₁-C₄-alkyl, C₁-C₆-alkoxy, C₂-C₆-alkenyloxy, C₂-C₆-alkynyloxy, C₃-C₆-cycloalkoxy or (C₃-C₆-cycloalkyl)-C₁-C₄-alkoxy, where the aliphatic and cycloaliphatic parts of the 9 aforementioned radicals are unsubstituted, partly or completely halogenated,
[0846] R³ is selected from the group consisting of H, halogen, CN, C₁-C₆-alkyl, C₁-C₆-haloalkyl, C₁-C₆-alkoxy and C₁-C₆-haloalkoxy;
[0847] R⁴ is selected from the group consisting of H, halogen, CN, C₁-C₆-alkyl, C₂-C₆-alkenyl, C₃-C₆-alkynyl, C₃-C₆-cycloalkyl, (C₃-C₆-cycloalkyl)-C₁-C₆-alkyl, C₃-C₆-cycloalkenyl and C₁-C₆-alkoxy-C₁-C₆-alkyl, where the aliphatic and cycloaliphatic parts of the 7 aforementioned radicals are unsubstituted, partly or completely halogenated; or
[0848] R³ and R⁴ together with the carbon atom to which they are attached form a moiety selected from the group consisting of carbonyl, C₂-C₆-alkenyl, C₃-C₆-cycloalkyl, C₃-C₆-cycloalkenyl and three- to six-membered heterocyclyl,
[0849] wherein the C₃-C₆-cycloalkyl, C₃-C₆-cycloalkenyl, or three- to six-membered heterocyclyl is unsubstituted or substituted by one to three substituents selected from halogen, CN, C₁-C₆-alkyl and C₁-C₆-alkoxy; and
[0850] R⁵ is selected from the group consisting of H, OH, S(O)₂NH₂, CN, C₁-C₆-alkyl, C₂-C₆-alkenyl, C₂-C₆-alkynyl, (C₃-C₆-cycloalkyl)-C₁-C₆-alkyl, C₁-C₆-alkoxy, (C₁-C₆-alkoxy)-C₁-C₆-alkyl, (C₁-C₆-alkyl)-carbonyl, (C₁-C₆-alkoxy)carbonyl, (C₁-C₆-alkyl)sulfonyl, (C₁-C₆-alkylamino)carbonyl, di(C₁-C₆-alkyl)aminocarbonyl, (C₁-C₆-alkylamino)sulfonyl, di(C₁-C₆-alkyl)aminosulfonyl and (C₁-C₆-alkoxy)sulfonyl, where the aliphatic and cycloaliphatic parts of the 14 aforementioned radicals are unsubstituted, partly or completely halogenated,
[0851] phenyl, phenyl-C₁-C₆-alkyl, phenylsulfonyl, phenylaminosulfonyl, phenylcarbonyl and phenoxycarbonyl,
[0852] wherein phenyl in the last 6 mentioned radicals are unsubstituted or substituted by 1, 2, 3, 4 or 5 identical or different substituents selected from the group consisting of halogen, CN, NO₂, C₁-C₆-alkyl, C₁-C₆-haloalkyl, C₁-C₆-alkoxy and C₁-C₆-haloalkoxy;

[0853] and wherein the variables A, R¹, R², R³, R⁴ and R⁵ are preferred:
[0854] A is heteroaryl, which is substituted by one to six substituents selected from the group consisting of halogen, CN, NO₂, C₁-C₆-alkyl, C₁-C₆-haloalkyl, OH, C₁-C₆-alkoxy, C₁-C₆-alkylthio, (C₁-C₆-alkyl)sulfinyl, (C₁-C₆-alkyl)sulfonyl, amino, (C₁-C₆-alkyl)amino, di(C₁-C₆-alkyl)amino, (C₁-C₆-alkyl)carbonyl, (C₁-C₆-alkoxy)carbonyl;
[0855] R¹ is H, CN, C₁-C₆-alkyl, C₁-C₆-alkoxy-C₁-C₆-alkyl, C₁-C₆-alkoxy, (C₁-C₆-alkyl)carbonyl, (C₁-C₆-alkoxy)carbonyl, (C₁-C₆-alkyl)sulfonyl or phenylsulfonyl,
[0856] wherein the phenyl is unsubstituted or substituted by one to five substituents selected from the group consisting of halogen, CN, NO₂, C₁-C₆-alkyl, C₁-C₆-haloalkyl and C₁-C₆-alkoxy;
[0857] R² is H, halogen, OH, CN, C₁-C₆-alkyl, C₂-C₆-alkenyl, C₃-C₆-alkynyl, (C₁-C₆-alkoxy)-C₁-C₆-alkyl, C₃-C₆-cycloalkyl, C₃-C₆-cycloalkenyl, (C₃-C₆-cycloalkyl)-C₁-C₄-alkyl, C₁-C₆-alkoxy, C₂-C₆-alkenyloxy, C₂-C₆-alkynyloxy, C₃-C₆-cycloalkoxy or (C₃-C₆-cycloalkyl)-C₁-C₄-alkoxy, where the aliphatic and cycloaliphatic parts of the 9 aforementioned radicals are unsubstituted, partly or completely halogenated
[0858] R³ is H, halogen, CN, C₁-C₆-alkyl, C₁-C₆-haloalkyl or C₁-C₆-alkoxy;
[0859] R⁴ is H, halogen, CN, C₁-C₆-alkyl or C₁-C₆-haloalkyl; or R³ and R⁴ together with the carbon atom to which they are attached form a moiety selected from the group consisting of carbonyl, C₂-C₆-alkenyl, C₃-C₆-cycloalkyl, C₃-C₆-cycloalkenyl and three- to six-membered heterocyclyl,
[0860] wherein the C₃-C₆-cycloalkyl, C₃-C₆-cycloalkenyl, or three- to six-membered heterocyclyl is unsubstituted or substituted by one to three substituents selected from halogen, CN, C₁-C₆-alkyl and C₁-C₆-alkoxy; and
[0861] R⁵ is H, CN, C₁-C₆-alkyl, C₁-C₆-alkoxy-C₁-C₆-alkyl, C₁-C₆-alkoxy, (C₁-C₆-alkyl)carbonyl, (C₁-C₆-alkoxy)carbonyl, (C₁-C₆-alkyl)sulfonyl or phenylsulfonyl,
[0862] wherein the phenyl is unsubstituted or substituted by one to five substituents selected from the group consisting of halogen, CN, NO₂, C₁-C₆-alkyl, C₁-C₆-haloalkyl and C₁-C₆-alkoxy;

[0863] including their agriculturally acceptable salts or N-oxides.

[0864] In another preferred embodiment, the azines useful for the present invention comprise a diaminotriazine compound of formula (I)

[chemical structure]

[0865] wherein
[0866] p is 1 or 2;
[0867] q is 0, 1, 2 or 3 provided that p+q is 1, 2, 3 or 4;
[0868] Q is a chemical bond, O, S(O)ₘ, CR^{q1}R^{q2}, NR^{q3}, C(O), C(O)O, CR^{q1}R^{q2}—O, S(O)ₘNR^{q3} or C(O)NR^{q3},
   [0869] wherein
   [0870] m is 0, 1 or 2;
   [0871] R^{q1}, R^{q2} are hydrogen, halogen or C₁-C₄-alkyl;
   [0872] R^{q3} is H, CN, C₁-C₆-alkyl, (C₁-C₆-alkoxy)-C₁-C₆-alkyl, (C₁-C₆-alkyl)-carbonyl, (C₁-C₆-alkoxy)carbonyl, (C₁-C₆-alkyl)sulfonyl, where the aliphatic parts of the 6 aforementioned radicals are unsubstituted, partly or completely halogenated;
[0873] Ar is phenyl, which is unsubstituted or carries 1, 2, 3, 4 or 5 radicals R^{A} which are selected from the group consisting of halogen, OH, CN, amino, NO₂, C₁-C₆-alkyl, C₂-C₆-alkenyl, C₂-C₆-alkynyl, C₁-C₆-alkoxy, C₂-C₆-alkenyloxy, C₂-C₆-alkynyloxy, (C₁-C₆-alkoxy)-C₁-C₆-alkyl, (C₁-C₆-alkoxy)-C₁-C₆-alkoxy, (C₁-C₆-alkoxy)-C₂-C₆-alkenyl, (C₁-C₆-alkoxy)-C₂-C₆-alkynyl, C₁-C₆-alkylthio, (C₁-C₆-alkyl)sulfinyl, (C₁-C₆-alkyl)sulfonyl, (C₁-C₆-alkyl)amino, di(C₁-C₆-alkyl)amino, (C₁-C₆-alkyl)-carbonyl, (C₁-C₆-alkoxy)-carbonyl, (C₁-C₆-alkyl)-carbonyloxy, C₃-C₆-cycloalkyl, C₃-C₆-cycloalkoxy, (C₃-C₆-cycloalkyl)-C₁-C₄-alkyl, (C₃-C₆-cycloalkyl)-C₁-C₄-alkoxy, where the aliphatic and cycloaliphatic parts of the 22 aforementioned radicals are unsubstituted, partly or completely halogenated and where the cycloaliphatic parts of the last 4 mentioned radicals may carry 1, 2, 3, 4, 5 or 6 methyl groups,
   [0874] phenyl, phenyl-C₁-C₆-alkyl, phenylsulfonyl, phenylaminosulfonyl, phenylaminocarbonyl, phenyl(C₁-C₆-alkyl)aminocarbonyl, phenylcarbonyl and phenoxycarbonyl,
   [0875] wherein phenyl in the last 8 mentioned radicals are unsubstituted or substituted by 1, 2, 3, 4 or 5 identical or different substituents selected from the group consisting of halogen, CN, NO₂, C₁-C₆-alkyl, C₁-C₆-haloalkyl, C₁-C₆-alkoxy and C₁-C₆-haloalkoxy,
   [0876] it being possible that R^{A} are identical or different;
[0877] R^{a} is selected from the group consisting of hydrogen, halogen, OH, CN, amino, NO₂, C₁-C₆-alkyl, C₂-C₆-alkenyl, C₂-C₆-alkynyl, C₁-C₆-alkoxy, C₂-C₆-alkenyloxy, C₂-C₆-alkynyloxy, C₁-C₆-alkylthio, (C₁-C₆-alkyl)sulfinyl, (C₁-C₆-alkyl)sulfonyl, (C₁-C₆-alkyl)amino, di(C₁-C₆-alkyl)amino, (C₁-C₆-alkyl)-carbonyl, (C₁-C₆-alkoxy)-carbonyl, (C₁-C₆-alkyl)-carbonyloxy, where the aliphatic and cycloaliphatic parts of the 14 aforementioned radicals are unsubstituted, partly or completely halogenated;
[0878] R^{b} is selected from the group consisting of halogen, OH, CN, amino, NO₂, C₁-C₆-alkyl, C₂-C₆-alkenyl, C₂-C₆-alkynyl, C₁-C₆-alkoxy, C₂-C₆-alkenyloxy, C₂-C₆-alkynyloxy, (C₁-C₆-alkoxy)-C₁-C₆-alkyl, (C₁-C₆-alkoxy)-C₁-C₆-alkoxy, (C₁-C₆-alkoxy)-C₂-C₆-alkenyl, (C₁-C₆-alkoxy)-C₂-C₆-alkynyl, C₁-C₆-alkylthio, (C₁-C₆-alkyl)sulfinyl, (C₁-C₆-alkyl)sulfonyl, (C₁-C₆-alkyl)amino, di(C₁-C₆-alkyl)amino, (C₁-C₆-alkyl)-carbonyl, (C₁-C₆-alkoxy)-carbonyl, (C₁-C₆-alkyl)-carbonyloxy, C₃-C₆-cycloalkyl, C₃-C₆-cycloalkoxy, (C₃-C₆-cycloalkyl)-C₁-C₄-alkyl, (C₃-C₆-cycloalkyl)-C₁-C₄-alkoxy, where the aliphatic and cycloaliphatic parts of the 22 aforementioned radicals are unsubstituted, partly or completely halogenated and where the cycloaliphatic parts of the last 4 mentioned radicals may carry 1, 2, 3, 4, 5 or 6 methyl groups,
   [0879] for q=2 or 3 it being possible that R^{b} are identical or different;
[0880] R¹ is selected from the group consisting of H, OH, S(O)₂NH₂, CN, C₁-C₆-alkyl, C₂-C₆-alkenyl, C₂-C₆-alkynyl, (C₃-C₆-cycloalkyl)-C₁-C₄-alkyl, C₁-C₆-alkoxy, (C₁-C₆-alkoxy)-C₁-C₆-alkyl, (C₃-C₆-cycloalkyl)-carbonyl, (C₁-C₆-alkyl)-carbonyl, (C₁-C₆-alkoxy)carbonyl, (C₁-C₆-alkyl)sulfonyl, (C₁-C₆-alkylamino)carbonyl, di(C₁-C₆-alkyl)aminocarbonyl, (C₁-C₆-alkylamino)sulfonyl, di(C₁-C₆-alkyl)aminosulfonyl and (C₁-C₆-alkoxy)sulfonyl, where the aliphatic and cycloaliphatic parts of the 15 aforementioned radicals are unsubstituted, partly or completely halogenated,
   [0881] phenyl, phenyl-C₁-C₆-alkyl, phenylsulfonyl, phenylaminosulfonyl, phenylaminocarbonyl, phenyl(C₁-C₆-alkyl)aminocarbonyl, phenylcarbonyl and phenoxycarbonyl,
   [0882] wherein phenyl in the last 8 mentioned radicals are unsubstituted or substituted by 1, 2, 3, 4 or 5 identical or different substituents selected from the group consisting of halogen, CN, NO₂, C₁-C₆-alkyl, C₁-C₆-haloalkyl, C₁-C₆-alkoxy and C₁-C₆-haloalkoxy;
[0883] R² is selected from the group consisting of H, OH, S(O)₂NH₂, CN, C₁-C₆-alkyl, C₂-C₆-alkenyl, C₂-C₆-alkynyl, (C₃-C₆-cycloalkyl)-C₁-C₄-alkyl, C₃-C₆-cycloalkyl)-carbonyl C₁-C₆-alkoxy, (C₁-C₆-alkoxy)-C₁-C₆-alkyl, (C₁-C₆-alkyl)carbonyl, (C₁-C₆-alkoxy)carbonyl, (C₁-C₆-alkyl)sulfonyl, (C₁-C₆-alkylamino)carbonyl, di(C₁-C₆-alkyl)aminocarbonyl, (C₁-C₆-alkylamino)sulfonyl, di(C₁-C₆-alkyl)aminosulfonyl and (C₁-C₆-alkoxy)sulfonyl, where the aliphatic and cycloaliphatic parts of the 15 aforementioned radicals are unsubstituted, partly or completely halogenated,
   [0884] phenyl, phenylsulfonyl, phenylaminosulfonyl, phenylaminocarbonyl, phenyl(C₁-C₆-alkyl)aminocarbonyl, phenyl-C₁-C₆ alkyl, phenoxy, phenylcarbonyl and phenoxycarbonyl,
   [0885] wherein phenyl in the last 9 mentioned radicals is unsubstituted or substituted by 1, 2, 3, 4 or 5 identical or different substituents selected from the group consisting of halogen, CN, NO₂, C₁-C₆-alkyl, C₁-C₆-haloalkyl, C₁-C₆-alkoxy and C₁-C₆-haloalkoxy;
[0886] X is a radical selected from the group consisting of
   [0887] CR³R⁴R⁵,
   [0888] phenyl, which is unsubstituted or carries 1, 2, 3, 4 or 5 radicals R^{Ar} which are identical or different;
   [0889] NR^{3a}R^{3b},
   [0890] OR^{3c} and
   [0891] S(O)ₖR^{3d} with k being 0, 1 or 2
   [0892] wherein
   [0893] R³ is selected from the group consisting of H, halogen, OH, CN, C₁-C₆-alkyl, (C₁-C₆-alkoxy)-C₁-C₆-alkyl, C₃-C₆-cycloalkyl, (C₃-C₆-cycloalkyl)-C₁-C₄-alkyl, C₁-C₆-alkoxy, C₂-C₆-alkenyloxy, C₂-C₆-alkynyloxy, C₃-C₆-cycloalkoxy, (C₃-C₆-cycloalkyl)-C₁-C₄-alkoxy, where the aliphatic and cycloaliphatic parts of the 9 aforementioned radicals are unsubstituted, partly or completely halogenated;
   [0894] R⁴ is selected from the group consisting of H, halogen, CN, C₁-C₆-alkyl, C₁-C₆-haloalkyl, C₁-C₆-alkoxy and C₁-C₆-haloalkoxy;
   [0895] R⁵ is selected from the group consisting of halogen, CN, C₁-C₆-alkyl, C₂-C₆-alkenyl, C₃-C₆-alkynyl, C₃-C₆-cycloalkyl, (C₃-C₆-cycloalkyl)-C₁-C₄-alkyl, C₃-C₆-cycloalkenyl and C₁-C₆-alkoxy-C₁-C₆-alkyl, where the aliphatic and cycloaliphatic parts of the 7 aforementioned radicals are unsubstituted, partly or completely halogenated;
   [0896] R⁴ and R⁵ together with the carbon atom to which they are attached form a moiety selected from the group consisting of carbonyl, C₃-C₆-cycloalkyl, C₃-C₆-cycloalkenyl, three- to six-membered saturated or partially unsaturated heterocyclyl, and the moiety >C═CR^{x}R^{y}, where R^{x} and R^{y} are hydrogen, C₁-C₄-alkyl or C₁-C₄-haloalkyl;
   [0897] R^{Ar} selected from the group consisting of halogen, OH, CN, amino, NO₂, C₁-C₆-alkyl, C₂-C₆-alkenyl, C₂-C₆-alkynyl, C₁-C₆-alkoxy, C₂-C₆-alkenyloxy, C₂-C₆-alkynyloxy, (C₁-C₆-alkoxy)-C₁-C₆-alkyl, (C₁-C₆-alkoxy)-C₁-C₆-alkoxy, (C₁-C₆-alkoxy)-C₂-C₆-alkenyl, (C₁-C₆-alkoxy)-C₂-C₆-alkynyl, C₁-C₆-alkylthio, (C₁-C₆-alkyl)sulfinyl, (C₁-C₆-alkyl)sulfonyl, (C₁-C₆-alkyl)amino, di(C₁-C₆-alkyl)amino, (C₁-C₆-alkyl)-carbonyl, (C₁-C₆-alkoxy)-carbonyl, (C₁-C₆-alkyl)-carbonyloxy, C₃-C₆-cycloalkyl, C₃-C₆-cycloalkoxy, (C₃-C₆-cycloalkyl)-C₁-C₄-alkyl, (C₃-C₆-cycloalkyl)-C₁-C₄-alkoxy, where the aliphatic and cycloaliphatic parts of the 22 aforementioned radicals are unsubstituted, partly or completely halogenated and where the cycloaliphatic parts of the last 4 mentioned radicals may carry 1, 2, 3, 4, 5 or 6 methyl groups,
   [0898] R^{3a}, R^{3b}, R^{3c} or R^{3d} are independently of one another are selected from the group consisting of H, CN, S(O)₂NH₂, C₁-C₆-alkyl, C₂-C₆-alkenyl, C₂-C₆-alkynyl, C₃-C₆-cycloalkyl, (C₃-C₆-cycloalkyl)-C₁-C₆-alkyl, (C₁-C₆-alkoxy)-C₁-C₆-alkyl, (C₁-C₆-alkyl)-carbonyl, (C₁-C₆-alkoxy)carbonyl, (C₁-C₆-alkyl)sulfonyl, (C₁-C₆-alkylamino)carbonyl, di(C₁-C₆-alkyl)aminocarbonyl, (C₃-C₆-cycloalkyl)-carbonyl, (C₁-C₆-alkylamino)sulfonyl, di(C₁-C₆-alkyl)aminosulfonyl and (C₁-C₆-alkoxy)sulfonyl, where the aliphatic and cycloaliphatic parts of the 15 aforementioned radicals are unsubstituted, partly or completely halogenated, phenyl, phenylsulfonyl, phenyl-C₁-C₆ alkyl, phenylaminosulfonyl, phenylcarbonyl and phenoxycarbonyl, wherein phenyl in the last 6 mentioned radicals is unsubstituted or substituted by 1, 2, 3, 4 or 5 identical or different substituents selected from the group consisting of halogen, CN, NO₂, C₁-C₆-alkyl, C₁-C₆-haloalkyl, C₁-C₆-alkoxy and C₁-C₆-haloalkoxy, or
   [0899] R^{3a}, R^{3b} together with the nitrogen atom, to which they are bound, form an N-bound, mono—or bicyclic heterocyclic radical, which may have 1, 2, 3 or 4 further heteroatoms which are selected from N, O and S, which is unsubstituted or substituted by one or more identical or different substituents selected from the group consisting of halogen, CN, NO₂, C₁-C₆-alkyl, C₁-C₆-haloalkyl, C₁-C₆-alkoxy and C₁-C₆-haloalkoxy,
      [0900] one of R^{3a}, R^{3b} may also be OH, C₁-C₆-alkoxy, C₃-C₆-cycloalkoxy, (C₃-C₆-cycloalkyl)-C₁-C₄-alkoxy C₂-C₆-alkenyloxy, C₂-C₆-alkynyloxy, (C₁-C₆-alkoxy)-C₁-C₆-alkoxy, where the aliphatic and cycloaliphatic parts of the 7 aforementioned radicals are unsubstituted, partly or completely halogenated, or phenoxy, which is unsubstituted or substituted by 1, 2, 3, 4 or 5 identical or different substituents selected from the group consisting of halogen, CN, NO₂, C₁-C₆-alkyl, C₁-C₆-haloalkyl, C₁-C₆-alkoxy and C₁-C₆-haloalkoxy;
   [0901] including their agriculturally acceptable salts

[0902] In another preferred embodiment, the azines useful for the present invention comprises a diaminotriazine compound of the formula:

[chemical structure]

[0903] wherein
[0904] A is a fused saturated or unsaturated, 5- or 6-membered carbocycle or a fused saturated or unsaturated, 5- or 6-membered heterocycle having 1, 2 or 3 heteroatoms or heteroatom moieties, selected from O, S, S(O)ₚ, N or NR^{c} as ring members,
   [0905] where the carbocycle and the heterocycle are unsubstituted or carry 1, 2, 3 or 4 radicals R^{A};
[0906] p is 0, 1 or 2
[0907] q is 0, 1, 2 or 3;
[0908] R^{A} is selected from the group consisting of halogen, OH, CN, amino, NO₂, C₁-C₆-alkyl, C₂-C₆-alkenyl, C₂-C₆-alkynyl, C₁-C₆-alkoxy, C₂-C₆-alkenyloxy, C₂-C₆-alkynyloxy, (C₁-C₆-alkoxy)-C₁-C₆-alkyl, (C₁-C₆-alkoxy)-C₁-C₆-alkoxy, (C₁-C₆-alkoxy)-C₂-C₆-alkenyl, (C₁-C₆-alkoxy)-C₂-C₆-alkynyl, C₁-C₆-alkylthio, (C₁-C₆-alkyl)sulfinyl, (C₁-C₆-alkyl)sulfonyl, (C₁-C₆-alkyl)amino, di(C₁-C₆-alkyl)amino, (C₁-C₆-alkyl)-carbonyl, (C₁-C₆-alkoxy)-carbonyl, (C₁-C₆-alkyl)-carbonyloxy, C₃-C₆-cycloalkyl, C₃-C₆-cycloalkoxy, (C₃-C₆-cycloalkyl)-C₁-C₄-alkyl, (C₃-C₆-cycloalkyl)-C₁-C₄-alkoxy, where the aliphatic and cycloaliphatic parts of the 22 aforementioned radicals are unsubstituted, partly or completely halogenated and where the cycloaliphatic parts of the last 4 mentioned radicals may carry 1, 2, 3, 4, 5 or 6 methyl groups,
   [0909] it being possible that R^{A} are identical or different, it being possible that two radicals R^{A} which are bound at the same carbon atom may together be ═O or ═NR^{d};
[0910] R^{b} is selected from the group consisting of halogen, OH, CN, amino, NO₂, C₁-C₆-alkyl, C₂-C₆-alkenyl, C₂-C₆-alkynyl, C₁-C₆-alkoxy, C₂-C₆-alkenyloxy, C₂-C₆-alkynyloxy, (C₁-C₆-alkoxy)-C₁-C₆-alkyl, (C₁-C₆-alkoxy)-C₁-C₆-alkoxy, (C₁-C₆-alkoxy)-C₂-C₆-alkenyl, (C₁-C₆-alkoxy)-C₂-C₆-alkynyl, C₁-C₆-alkylthio, (C₁-C₆-alkyl)sulfinyl, (C₁-C₆-alkyl)sulfonyl, (C₁-C₆-alkyl)amino, di(C₁-C₆-alkyl)amino, (C₁-C₆-alkyl)-carbonyl, (C₁-C₆-alkoxy)-carbonyl, (C₁-C₆-alkyl)-carbonyloxy, C₃-C₆-cycloalkyl, C₃-C₆-cycloalkoxy, (C₃-C₆-cycloalkyl)-C₁-C₄-alkyl, (C₃-C₆-cycloalkyl)-C₁-C₄-alkoxy, where the aliphatic and cycloaliphatic parts of the 22 aforementioned radicals are unsubstituted, partly or completely halogenated and where the cycloaliphatic parts of the last 4 mentioned radicals may carry 1, 2, 3, 4, 5 or 6 methyl groups,
   [0911] for q=2 or 3 it being possible that R^{b} are identical or different;
[0912] R^{c} is selected from the group consisting of H, OH, S(O)₂NH₂, CN, C₁-C₆-alkyl, C₂-C₆-alkenyl, C₂-C₆-alkynyl, C₃-C₆-cycloalkyl, C₃-C₆-cycloalkoxy, (C₃-C₆-cycloalkyl)-C₁-C₄-alkyl, C₁-C₆-alkoxy, (C₁-C₆-alkoxy)-C₁-C₆-alkyl, (C₁-C₆-alkyl)-carbonyl, (C₁-C₆-alkoxy)carbonyl, (C₁-C₆-alkyl)sulfonyl, (C₁-C₆-alkylamino)carbonyl, di(C₁-C₆-alkyl)aminocarbonyl, (C₁-C₆-alkylamino)sulfonyl, di(C₁-C₆-alkyl)aminosulfonyl and (C₁-C₆-alkoxy)sulfonyl, where the aliphatic and cycloaliphatic parts of the 16 aforementioned radicals are unsubstituted, partly or completely halogenated,
[0913] R^{d} is selected from the group consisting of H, CN, C₁-C₆-alkyl, C₂-C₆-alkenyl, C₂-C₆-alkynyl, (C₃-C₆-cycloalkyl)-C₁-C₄-alkyl, C₁-C₆-alkoxy, C₂-C₆-alkenyloxy, C₂-C₆-alkynyloxy, (C₁-C₆-alkoxy)-C₁-C₆-alkyl, where the aliphatic and cycloaliphatic parts of the 8 aforementioned radicals are unsubstituted, partly or completely halogenated;
[0914] R¹ is selected from the group consisting of H, OH, S(O)₂NH₂, CN, C₃-C₆-cycloalkyl, C₃-C₆-cycloalkoxy, C₁-C₆-alkyl, C₂-C₆-alkenyl, C₂-C₆-alkynyl, (C₃-C₆-cycloalkyl)-C₁-C₄-alkyl, C₁-C₆-alkoxy, (C₁-C₆-alkoxy)-C₁-C₆-alkyl, (C₁-C₆-alkyl)-carbonyl, (C₃-C₆-cycloalkyl)-carbonyl, (C₁-C₆-alkoxy)carbonyl, (C₁-C₆-alkyl)sulfonyl, (C₁-C₆-alkylamino)carbonyl, di(C₁-C₆-alkyl)aminocarbonyl, (C₁-C₆-alkylamino)sulfonyl, di(C₁-C₆-alkyl)aminosulfonyl and (C₁-C₆-alkoxy)sulfonyl, where the aliphatic and cycloaliphatic parts of the 17 aforementioned radicals are unsubstituted, partly or completely halogenated, phenyl, phenyl-C₁-C₆-alkyl, phenylsulfonyl, phenylaminosulfonyl, phenylaminocarbonyl, phenyl(C₁-C₆-alkyl)aminocarbonyl, phenylcarbonyl and phenoxycarbonyl,
   [0915] wherein phenyl in the last 8 mentioned radicals are unsubstituted or substituted by 1, 2, 3, 4 or 5 identical or different substituents selected from the group consisting of halogen, CN, NO₂, C₁-C₆-alkyl, C₁-C₆-haloalkyl, C₁-C₆-alkoxy and C₁-C₆-haloalkoxy;
[0916] R² is selected from the group consisting of H, OH, S(O)₂NH₂, CN, C₃-C₆-cycloalkyl, C₃-C₆-cycloalkoxy, C₁-C₆-alkyl, C₂-C₆-alkenyl, C₂-C₆-alkynyl, (C₃-C₆-cycloalkyl)-C₁-C₄-alkyl, C₁-C₆-alkoxy, (C₁-C₆-alkoxy)-C₁-C₆-alkyl, (C₁-C₆-alkyl)carbonyl, (C₃-C₆-cycloalkyl)-carbonyl, (C₁-C₆-alkoxy)carbonyl, (C₁-C₆-alkyl)sulfonyl, (C₁-C₆-alkylamino)carbonyl, di(C₁-C₆-alkyl)aminocarbonyl, (C₁-C₆-alkylamino)sulfonyl, di(C₁-C₆-alkyl)aminosulfonyl and (C₁-C₆-alkoxy)sulfonyl, where the aliphatic and cycloaliphatic parts of the 17 aforementioned radicals are unsubstituted, partly or completely halogenated, phenyl, phenylsulfonyl, phenylaminosulfonyl, phenyl-C₁-C₆ alkyl, phenoxy, phenylaminocarbonyl, phenyl(C₁-C₆-alkyl)aminocarbonyl, phenylcarbonyl and phenoxycarbonyl,
   [0917] wherein phenyl in the last 8 mentioned radicals is unsubstituted or substituted by 1, 2, 3, 4 or 5 identical or different substituents selected from the group consisting of halogen, CN, NO₂, C₁-C₆-alkyl, C₁-C₆-haloalkyl, C₁-C₆-alkoxy and C₁-C₆-haloalkoxy;
[0918] X is a radical selected from the group consisting of
   [0919] CR³R⁴R⁵
   [0920] phenyl, which is unsubstituted or carries 1, 2, 3, 4 or 5 radicals R^{Ar} which are identical or different;
   [0921] NR^{3a}R^{3b},
   [0922] OR^{3c} and
   [0923] S(O)ₖR^{3d} with k being 0, 1 or 2,
   [0924] wherein
   [0925] R³ is selected from the group consisting of H, halogen, OH, CN, C₁-C₆-alkyl, (C₁-C₆-alkoxy)-C₁-C₆-alkyl, C₃-C₆-cycloalkyl, (C₃-C₆-cycloalkyl)-C₁-C₄-alkyl, C₁-C₆-alkoxy, C₂-C₆-alkenyloxy, C₂-C₆-alkynyloxy, C₃-C₆-cycloalkoxy, (C₃-C₆-cycloalkyl)-C₁-C₄-alkoxy, where the aliphatic and cycloaliphatic parts of the 9 aforementioned radicals are unsubstituted, partly or completely halogenated;
   [0926] R⁴ is selected from the group consisting of H, halogen, CN, C₁-C₆-alkyl, C₁-C₆-haloalkyl, C₁-C₆-alkoxy and C₁-C₆-haloalkoxy;
   [0927] R⁵ is selected from the group consisting of halogen, CN, C₁-C₆-alkyl, C₂-C₆-alkenyl, C₃-C₆-alkynyl, C₃-C₆-cycloalkyl, (C₃-C₆-cycloalkyl)-C₁-C₄-alkyl, C₃-C₆-cycloalkenyl and C₁-C₆-alkoxy-C₁-C₆-alkyl, where the aliphatic and cycloaliphatic parts of the 7 aforementioned radicals are unsubstituted, partly or completely halogenated;
   [0928] R⁴ and R⁵ together with the carbon atom to which they are attached form a moiety selected from the group consisting of carbonyl, thiocarbonyl, C₃-C₆-cycloalkyl, C₃-C₆-cycloalkenyl, three- to six-membered saturated or partially unsaturated heterocyclyl, and the moiety >C═CR^{x}R^{y}, where R^{x} and R^{y} are hydrogen, C₁-C₄-alkyl or C₁-C₄-haloalkyl;
   [0929] R^{Ar} selected from the group consisting of halogen, OH, CN, amino, NO₂, C₁-C₆-alkyl, C₂-C₆-alkenyl, C₂-C₆-alkynyl, C₁-C₆-alkoxy, C₂-C₆-alkenyloxy, C₂-C₆-alkynyloxy, (C₁-C₆-alkoxy)-C₁-C₆-alkyl, (C₁-C₆-alkoxy)-C₁-C₆-alkoxy, (C₁-C₆-alkoxy)-C₂-C₆-alkenyl, (C₁-C₆-alkoxy)-C₂-C₆-alkynyl, C₁-C₆-alkylthio, (C₁-C₆-alkyl)sulfinyl, (C₁-C₆-alkyl)sulfonyl, (C₁-C₆-alkyl)amino, di(C₁-C₆-alkyl)amino, (C₁-C₆-alkyl)-carbonyl, (C₁-C₆-alkoxy)-carbonyl, (C₁-C₆-alkyl)-carbonyloxy, C₃-C₆-cycloalkyl, C₃-C₆-cycloalkoxy, (C₃-C₆-cycloalkyl)-C₁-C₄-alkyl, (C₃-C₆-cycloalkyl)-C₁-C₄-alkoxy, where the aliphatic and cycloaliphatic parts of the 22 aforementioned radicals are unsubstituted, partly or completely halogenated and where the cycloaliphatic parts of the last 4 mentioned radicals may carry 1, 2, 3, 4, 5 or 6 methyl groups,
   [0930] R^{3a}, R^{3b}, R^{3c} or R^{3d} are independently of one another are selected from the group consisting of H, CN, S(O)₂NH₂, C₁-C₆-alkyl, C₁-C₆-alkoxy, C₂-C₆-alkenyl, C₂-C₆-alkynyl, C₃-C₆-cycloalkyl, (C₃-C₆-cycloalkyl)-C₁-C₆-alkyl, (C₁-C₆-alkoxy)-C₁-C₆-alkyl, (C₁-C₆-alkyl)-carbonyl, (C₃-C₆-cycloalkyl)-carbonyl, (C₁-C₆-alkoxy)carbonyl, (C₁-C₆-alkyl)sulfonyl, (C₁-C₆-alkylamino)carbonyl, di(C₁-C₆-alkyl)aminocarbonyl, (C₁-C₆-alkylamino)sulfonyl, di(C₁-C₆-alkyl)aminosulfonyl and (C₁-C₆-alkoxy)sulfonyl, where the aliphatic and cycloaliphatic parts of the 16 aforementioned radicals are unsubstituted, partly or completely halogenated,
      [0931] phenyl, phenylsulfonyl, phenyl-C₁-C₆ alkyl, phenylaminosulfonyl, phenylcarbonyl and phenoxycarbonyl, wherein phenyl in the last 6 mentioned radicals is unsubstituted or substituted by 1, 2, 3, 4 or 5 identical or different substituents selected from the group consisting of halogen, CN, NO₂, C₁-C₆-alkyl, C₁-C₆-haloalkyl, C₁-C₆-alkoxy and C₁-C₆-haloalkoxy, or
   [0932] R^{3a}, R^{3b} together with the nitrogen atom, to which they are bound, form an N-bound, mono—or bicyclic heterocyclic radical, which may have 1, 2, 3 or 4 further heteroatoms which are selected from N, O and S, which is unsubstituted or substituted by one or more identical or different substituents selected from the group consisting of halogen, CN, NO₂, C₁-C₆-alkyl, C₁-C₆-haloalkyl, C₁-C₆-alkoxy and C₁-C₆-haloalkoxy,
      [0933] one of R^{3a}, R^{3b} may also be OH, C₁-C₆-alkoxy, C₃-C₆-cycloalkoxy, (C₃-C₆-cycloalkyl)-C₁-C₄-alkoxy, C₂-C₆-alkenyloxy, C₂-C₆-alkynyloxy, (C₁-C₆-alkoxy)-C₁-C₆-alkoxy, where the aliphatic and cycloaliphatic parts of the 6 aforementioned radicals are unsubstituted, partly or completely halogenated, or phenoxy, which is unsubstituted or substituted by 1, 2, 3, 4 or 5 identical or different substituents selected from the group consisting of halogen, CN, NO₂, C₁-C₆-alkyl, C₁-C₆-haloalkyl, C₁-C₆-alkoxy and C₁-C₆-haloalkoxy;
[0934] including their agriculturally acceptable salts.

[0935] In another preferred embodiment, the azines useful for the present invention comprise a diaminotriazine compound of formula (I)

[chemical structure]

[0936] wherein
[0937] A is phenyl, which is substituted by fluorine in the ortho-position and which may additionally carry 1, 2, 3 or 4 identical or different substituents R^{A} selected from the group consisting of halogen, OH, CN, amino, NO₂, C₁-C₆-alkyl, C₂-C₆-alkenyl, C₂-C₆-alkynyl, (C₁-C₆-alkoxy)-C₂-C₆-alkyl, (C₁-C₆-alkoxy)-C₂-C₆-alkenyl, (C₁-C₆-alkoxy)-C₂-C₆-alkynyl, (C₁-C₆-alkyl)amino, di(C₁-C₆-alkyl)amino, (C₁-C₆-alkyl)-carbonyl, (C₁-C₆-alkoxy)-carbonyl, C₃-C₆-cycloalkyl, (C₃-C₆-cycloalkyl)-C₁-C₄-alkyl, where the aliphatic and cycloaliphatic parts of the 11 aforementioned radicals are unsubstituted, partly or completely halogenated and where the cycloaliphatic parts of the last 4 mentioned radicals may carry 1, 2, 3, 4, 5 or 6 methyl groups;
[0938] R¹ is selected from the group consisting of H, OH, S(O)₂NH₂, CN, C₁-C₆-alkyl, C₂-C₆-alkenyl, C₂-C₆-alkynyl, (C₃-C₆-cycloalkyl)-C₁-C₄-alkyl, C₁-C₆-alkoxy, (C₁-C₆-alkoxy)-C₁-C₆-alkyl, (C₁-C₆-alkyl)-carbonyl, (C₁-C₆-alkoxy)carbonyl, (C₁-C₆-alkyl)sulfonyl, (C₁-C₆-alkylamino)carbonyl, di(C₁-C₆-alkyl)aminocarbonyl, (C₁-C₆-alkylamino)sulfonyl, di(C₁-C₆-alkyl)aminosulfonyl and (C₁-C₆-alkoxy)sulfonyl, where the aliphatic and cycloaliphatic parts of the 14 aforementioned radicals are unsubstituted, partly or completely halogenated,
   [0939] phenyl, phenyl-C₁-C₆-alkyl, phenylsulfonyl, phenylaminosulfonyl, phenylcarbonyl and phenoxycarbonyl,
   [0940] wherein phenyl in the last 6 mentioned radicals are unsubstituted or substituted by 1, 2, 3, 4 or 5 identical or different substituents selected from the group consisting of halogen, CN, NO₂, C₁-C₆-alkyl, C₁-C₆-haloalkyl, C₁-C₆-alkoxy and C₁-C₆-haloalkoxy;
[0941] R² is selected from the group consisting of H, OH, S(O)₂NH₂, CN, C₁-C₆-alkyl, C₂-C₆-alkenyl, C₂-C₆-alkynyl, (C₃-C₆-cycloalkyl)-C₁-C₄-alkyl, C₁-C₆-alkoxy, (C₁-C₆-alkoxy)-C₁-C₆-alkyl, (C₁-C₆-alkyl)carbonyl, (C₁-C₆-alkoxy)carbonyl, (C₁-C₆-alkyl)sulfonyl, (C₁-C₆-alkylamino)carbonyl, di(C₁-C₆-alkyl)aminocarbonyl, (C₁-C₆-alkylamino)sulfonyl, di(C₁-C₆-alkyl)aminosulfonyl and (C₁-C₆-alkoxy)sulfonyl, where the aliphatic and cycloaliphatic parts of the 14 aforementioned radicals are unsubstituted, partly or completely halogenated,
   [0942] phenyl, phenylsulfonyl, phenylaminosulfonyl, phenyl-C₁-C₆ alkyl, phenoxy, phenylcarbonyl and phenoxycarbonyl,
   [0943] wherein phenyl in the last 6 mentioned radicals is unsubstituted or substituted by 1, 2, 3, 4 or 5 identical or different substituents selected from the group consisting of halogen, CN, NO₂, C₁-C₆-alkyl, C₁-C₆-haloalkyl, C₁-C₆-alkoxy and C₁-C₆-haloalkoxy;
[0944] R³ is selected from the group consisting of C₁-C₆-alkyl, C₂-C₆-alkenyl, C₂-C₆-alkynyl, (C₃-C₆-cycloalkyl)-C₁-C₄-alkyl, (C₁-C₆-alkoxy)-C₁-C₆-alkyl, (C₁-C₆-alkyl)carbonyl, (C₁-C₆-alkoxy)carbonyl, (C₁-C₆-alkylamino)carbonyl and di(C₁-C₆-alkyl)aminocarbonyl, where the aliphatic and cycloaliphatic parts of the 9 aforementioned radicals are unsubstituted, partly or completely halogenated,
[0945] R⁴ and R⁵, together with the carbon atom, to which they are bound form a saturated 3-, 4-, 5- or 6-membered carbocyclic radical or a saturated 3-, 4-, 5- or 6-membered heterocyclic radical, where the carbocyclic radical and the heterocyclic radical are unsubstituted, partly or completely halogenated or carry from 1 to 6 C₁-C₆-alkyl groups;
[0946] including their agriculturally acceptable salts.

[0947] The herbicidal compounds (component A) useful for the present invention as disclosed SUPRA may further be used in conjunction with additional herbicides to which the crop plant is naturally tolerant or to which has been made tolerant by mutagenesis as described SUPRA, or to which it is resistant via expression of one or more additional transgenes as mentioned supra. The CESA-inhibiting herbicides useful for the present invention are often best applied in conjunction with one or more other herbicides to obtain control of a wider variety of undesirable vegetation. When used in conjunction with other herbicides (hereinafter referred to a compound B), the presently claimed compounds can be formulated with the other herbicide or herbicides, tank mixed with the other herbicide or herbicides, or applied sequentially with the other herbicide or herbicides.

[0948] The further herbicidal compound B (component B) is in particular selected from the herbicides of class b1) to b15):
[0949] b1) lipid biosynthesis inhibitors;
[0950] b2) acetolactate synthase inhibitors (ALS inhibitors);
[0951] b3) photosynthesis inhibitors;
[0952] b4) protoporphyrinogen-IX oxidase inhibitors,
[0953] b5) bleacher herbicides;
[0954] b6) enolpyruvyl shikimate 3-phosphate synthase inhibitors (EPSP inhibitors);
[0955] b7) glutamine synthetase inhibitors;
[0956] b8) 7,8-dihydropteroate synthase inhibitors (DHP inhibitors);
[0957] b9) mitosis inhibitors;
[0958] b10) inhibitors of the synthesis of very long chain fatty acids (VLCFA inhibitors);
[0959] b11) cellulose biosynthesis inhibitors;
[0960] b12) decoupler herbicides;
[0961] b13) auxinic herbicides;
[0962] b14) auxin transport inhibitors; and
[0963] b15) other herbicides selected from the group consisting of bromobutide, chlorflurenol, chlorflurenol-methyl, cinmethylin, cumyluron, dalapon, dazomet, difenzoquat, difenzoquat-metilsulfate, dimethipin, DSMA, dymron, endothal and its salts, etobenzanid, flamprop, flamprop-isopropyl, flamprop-methyl, flamprop-M-isopropyl, flamprop-M-methyl, flurenol, flurenol-butyl, flurprimidol, fosamine, fosamine-ammonium, indanofan, indaziflam, maleic hydrazide, mefluidide, metam, methiozolin (CAS 403640-27-7), methyl azide, methyl bromide, methyl-dymron, methyl iodide, MSMA, oleic acid, oxaziclomefone, pelargonic acid, pyributicarb, quinoclamine, triaziflam, tridiphane and 6-chloro-3-(2-cyclopropyl-6-methylphenoxy)-4-pyridazinol (CAS 499223-49-3) and its salts and esters;
   [0964] including their agriculturally acceptable salts or derivatives such as ethers, esters or amides.
   [0965] Preference is given to those compositions according to the present invention comprising at least one herbicide B selected from herbicides of class b1, b6, b9, b10 and b11.
   [0966] Examples of herbicides B which can be used in combination with the compounds of formula (I) according to the present invention are:

[0967] b1) from the group of the lipid biosynthesis inhibitors:

[0968] ACC-herbicides such as alloxydim, alloxydim-sodium, butroxydim, clethodim, clodinafop, clodinafop-propargyl, cycloxydim, cyhalofop, cyhalofop-butyl, diclofop, diclofop-methyl, fenoxaprop, fenoxaprop-ethyl, fenoxaprop-P, fenoxaprop-P-ethyl, fluazifop, fluazifop-butyl, fluazifop-P, fluazifop-P-butyl, haloxyfop, haloxyfop-methyl, haloxyfop-P, haloxyfop-P-methyl, metamifop, pinoxaden, profoxydim, propaquizafop, quizalofop, quizalofop-ethyl, quizalofop-tefuryl, quizalofop-P, quizalofop-P-ethyl, quizalofop-P-tefuryl, sethoxydim, tepraloxydim, tralkoxydim,

[0969] 4-(4′-Chloro-4-cyclopropyl-2′-fluoro[1,1′-biphenyl]-3-yl)-5-hydroxy-2,2,6,6-tetramethyl-2H-pyran-3(6H)-one (CAS 1312337-72-6); 4-(2′,4′-Dichloro-4-cyclopropyl[1,1-biphenyl]-3-yl)-5-hydroxy-2,2,6,6-tetramethyl-2H-pyran-3(6H)-one (CAS 1312337-45-3); 4-(4′-Chloro-4-ethyl-2′-fluoro[1,1′-biphenyl]-3-yl)-5-hydroxy-2,2,6,6-tetramethyl-2H-pyran-3(6H)-one (CAS 1033757-93-5); 4-(2′,4′-Dichloro-4-ethyl[1,1′-biphenyl]-3-yl)-2,2,6,6-tetramethyl-2H-pyran-3,5(4H,6H)-dione (CAS 1312340-84-3); 5-(Acetyloxy)-4-(4′-chloro-4-cyclopropyl-2′-fluoro[1,1′-biphenyl]-3-yl)-3,6-dihydro-2,2,6,6-tetramethyl-2H-pyran-3-one (CAS 1312337-48-6); 5-(Acetyloxy)-4-(2″,4′-dichloro-4-cyclopropyl-[1,1′-biphenyl]-3-yl)-3,6-dihydro-2,2,6,6-tetramethyl-2H-pyran-3-one; 5-(Acetyloxy)-4-(4′-chloro-4-ethyl-2′-fluoro[1,1′-biphenyl]-3-yl)-3,6-dihydro-2,2,6,6-tetramethyl-2H-pyran-3-one (CAS 1312340-82-1); 5-(Acetyloxy)-4-(2′,4′-dichloro-4-ethyl[1,1′-biphenyl]-3-yl)-3,6-dihydro-2,2,6,6-tetramethyl-2H-pyran-3-one (CAS 1033760-55-2); 4-(4′-Chloro-4-cyclopropyl-2′-fluoro[1,1′-biphenyl]-3-yl)-5,6-dihydro-2,2,6,6-tetramethyl-5-oxo-2H-pyran-3-yl carbonic acid methyl ester (CAS 1312337-51-1); 4-(2′,4′-Dichloro-4-cyclopropyl-[1,1-biphenyl]-3-yl)-5,6-dihydro-2,2,6,6-tetramethyl-5-oxo-2H-pyran-3-yl carbonic acid methyl ester; 4-(4′-Chloro-4-ethyl-2′-fluoro[1,1′-biphenyl]-3-yl)-5,6-dihydro-2,2,6,6-tetramethyl-5-oxo-2H-pyran-3-yl carbonic acid methyl ester (CAS 1312340-83-2); 4-(2′,4′-Dichloro-4-ethyl[1,1′-biphenyl]-3-yl)-5,6-dihydro-2,2,6,6-tetramethyl-5-oxo-2H-pyran-3-yl carbonic acid methyl ester (CAS 1033760-58-5); and non ACC herbicides such as benfuresate, butylate, cycloate, dalapon, dimepiperate, EPTC, esprocarb, ethofumesate, flupropanate, molinate, orbencarb, pebulate, prosulfocarb, TCA, thiobencarb, tiocarbazil, triallate and vernolate;

[0970] b2) from the group of the ALS inhibitors:

[0971] sulfonylureas such as amidosulfuron, azimsulfuron, bensulfuron, bensulfuron-methyl, chlorimuron, chlorimuron-ethyl, chlorsulfuron, cinosulfuron, cyclosulfamuron, ethametsulfuron, ethametsulfuron-methyl, ethoxysulfuron, flazasulfuron, flucetosulfuron, flupyrsulfuron, flupyrsulfuron-methyl-sodium, foramsulfuron, halosulfuron, halosulfuron-methyl, imazosulfuron, iodosulfuron, iodosulfuron-methyl-sodium, iofensulfuron, iofensulfuron-sodium, mesosulfuron, metazosulfuron, metsulfuron, metsulfuron-methyl, nicosulfuron, orthosulfamuron, oxasulfuron, primisulfuron, primisulfuron-methyl, propyrisulfuron, prosulfuron, pyrazosulfuron, pyrazosulfuron-ethyl, rimsulfuron, sulfometuron, sulfometuron-methyl, sulfosulfuron, thifensulfuron, thifensulfuron-methyl, triasulfuron, tribenuron, tribenuron-methyl, trifloxysulfuron, triflusulfuron, triflusulfuron-methyl and tritosulfuron,

[0972] imidazolinones such as imazamethabenz, imazamethabenz-methyl, imazamox, imazapic, imazapyr, imazaquin and imazethapyr, triazolopyrimidine herbicides and sulfonanilides such as cloransulam, cloransulam-methyl, diclosulam, flumetsulam, florasulam, metosulam, penoxsulam, pyrimisulfan and pyroxsulam,

[0973] pyrimidinylbenzoates such as bispyribac, bispyribac-sodium, pyribenzoxim, pyriftalid, pyriminobac, pyriminobac-methyl, pyrithiobac, pyrithiobac-sodium, 4-[[[2-[(4,6-dimethoxy-2-pyrimidinyl)oxy]phenyl]methyl]amino]-benzoic acid-1-methylethyl ester (CAS 420138-41-6), 4-[[[2-[(4,6-dimethoxy-2-pyrimidinyl)oxy]phenyl]methyl]amino]-benzoic acid propyl ester (CAS 420138-40-5), N-(4-bromophenyl)-2-[(4,6-dimethoxy-2-pyrimidinyl)oxy]benzenemethanamine (CAS 420138-01-8),

[0974] sulfonylaminocarbonyl-triazolinone herbicides such as flucarbazone, flucarbazone-sodium, propoxycarbazone, propoxycarbazone-sodium, thiencarbazone and thiencarbazone-methyl; and triafamone;

[0975] among these, a preferred embodiment of the invention relates to those compositions comprising at least one imidazolinone herbicide;

[0976] b3) from the group of the photosynthesis inhibitors:

[0977] amicarbazone, inhibitors of the photosystem II, e.g. triazine herbicides, including of chlorotriazine, triazinones, triazindiones, methylthiotriazines and pyridazinones such as ametryn, atrazine, chloridazone, cyanazine, desmetryn, dimethametryn, hexazinone, metribuzin, prometon, prometryn, propazine, simazine, simetryn, terbumeton, terbuthylazin, terbutryn and trietazin, aryl urea such as chlorobromuron, chlorotoluron, chloroxuron, dimefuron, diuron, fluometuron, isoproturon, isouron, linuron, metamitron, methabenzthiazuron, metobenzuron, metoxuron, monolinuron, neburon, siduron, tebuthiuron and thiadiazuron, phenyl carbamates such as desmedipham, karbutilat, phenmedipham, phenmedipham-ethyl, nitrile herbicides such as bromofenoxim, bromoxynil and its salts and esters, ioxynil and its salts and esters, uraciles such as bromacil, lenacil and terbacil, and bentazon and bentazon-sodium, pyridate, pyridafol, pentanochlor and propanil and inhibitors of the photosystem I such as diquat, diquat-dibromide, paraquat, paraquat-dichloride and paraquat-dimetilsulfate. Among these, a preferred embodiment of the invention relates to those compositions comprising at least one aryl urea herbicide. Among these, likewise a preferred embodiment of the invention relates to those compositions comprising at least one triazine herbicide. Among these, likewise a preferred embodiment of the invention relates to those compositions comprising at least one nitrile herbicide;

[0978] b4) from the group of the protoporphyrinogen-IX oxidase inhibitors:

[0979] acifluorfen, acifluorfen-sodium, azafenidin, bencarbazone, benzfendizone, bifenox, butafenacil, carfentrazone, carfentrazone-ethyl, chlomethoxyfen, cinidon-ethyl, fluazolate, flufenpyr, flufenpyr-ethyl, flumiclorac, flumiclorac-pentyl, flumioxazin, fluoroglycofen, fluoroglycofen-ethyl, fluthiacet, fluthiacet-methyl, fomesafen, halosafen, lactofen, oxadiargyl, oxadiazon, oxyfluorfen, pentoxazone, profluazol, pyraclonil, pyraflufen, pyraflufen-ethyl, saflufenacil, sulfentrazone, thidiazimin, tiafenacil, ethyl [3-[2-chloro-4-fluoro-5-(1-methyl-6-trifluoromethyl-2,4-dioxo-1,2,3,4-tetrahydropyrimidin-3-yl)phenoxy]-2-pyridyloxy]acetate (CAS 353292-31-6; S-3100), N-ethyl-3-(2,6-dichloro-4-trifluoromethylphenoxy)-5-methyl-1H-pyrazole-1-carboxamide (CAS 452098-92-9), N-tetrahydrofurfuryl-3-(2,6-dichloro-4-trifluoromethylphenoxy)-5-methyl-1H-pyrazole-1-carboxamide (CAS 915396-43-9), N-ethyl-3-(2-chloro-6-fluoro-4-trifluoromethylphenoxy)-5-methyl-1H-pyrazole-1-carboxamide (CAS 452099-05-7), N-tetrahydrofurfuryl-3-(2-chloro-6-fluoro-4-trifluoromethylphenoxy)-5-methyl-1H-pyrazole-1-carboxamide (CAS 452100-03-7), 3-[7-fluoro-3-oxo-4-(prop-2-ynyl)-3,4-dihydro-2H-benzo[1,4]oxazin-6-yl]-1,5-dimethyl-6-thioxo-[1,3,5]triazinan-2,4-dione, 1,5-dimethyl-6-thioxo-3-(2,2,7-trifluoro-3-oxo-4-(prop-2-ynyl)-3,4-dihydro-2H-benzo[b][1,4]oxazin-6-yl)-1,3,5-triazinane-2,4-dione (CAS 1258836-72-4), 2-(2,2,7-Trifluoro-3-oxo-4-prop-2-ynyl-3,4-dihydro-2H-benzo[1,4]oxazin-6-yl)-4,5,6,7-tetrahydro-isoindole-1,3-dione, 1-Methyl-6-trifluoromethyl-3-(2,2,7-trifluoro-3-oxo-4-prop-2-ynyl-3,4-dihydro-2H-benzo[1,4]oxazin-6-yl)-1H-pyrimidine-2,4-dione, methyl (E)-4-[2-chloro-5-[4-chloro-5-(difluoromethoxy)-1H-methyl-pyrazol-3-yl]-4-fluoro-phenoxy]-3-methoxy-but-2-enoate [CAS 948893-00-3], and 3-[7-Chloro-5-fluoro-2-(trifluoromethyl)-1H-benzimidazol-4-yl]-1-methyl-6-(trifluoromethyl)-1H-pyrimidine-2,4-dione (CAS 212754-02-4);

[0980] b5) from the group of the bleacher herbicides:

[0981] PDS inhibitors: beflubutamid, diflufenican, fluridone, flurochloridone, flurtamone, norflurazon, picolinafen, and 4-(3-trifluoromethylphenoxy)-2-(4-trifluoromethylphenyl)-pyrimidine (CAS 180608-33-7), HPPD inhibitors: benzobicyclon, benzofenap, clomazone, fenquintrione, isoxaflutole, mesotrione, pyrasulfotole, pyrazolynate, pyrazoxyfen, sulcotrione, tefuryltrione, tembotrione, topramezone and bicyclopyrone, bleacher, unknown target: aclonifen, amitrole and flumeturon;

[0982] b6) from the group of the EPSP synthase inhibitors:

[0983] glyphosate, glyphosate-isopropylammonium, glyposate-potassium and glyphosate-trimesium (sulfosate);

[0984] b7) from the group of the glutamine synthase inhibitors:

[0985] bilanaphos (bialaphos), bilanaphos-sodium, glufosinate, glufosinate-P and glufosinate-ammonium;

[0986] b8) from the group of the DHP synthase inhibitors:

[0987] asulam;

[0988] b9) from the group of the mitosis inhibitors:

[0989] compounds of group K1: dinitroanilines such as benfluralin, butralin, dinitramine, ethalfluralin, fluchloralin, oryzalin, pendimethalin, prodiamine and trifluralin, phosphoramidates such as amiprophos, amiprophos-methyl, and butamiphos, benzoic acid herbicides such as chlorthal, chlorthal-dimethyl, pyridines such as dithiopyr and thiazopyr, benzamides such as propyzamide and tebutam; compounds of group K2: chlorpropham, propham and carbetamide, among these, compounds of group K1, in particular dinitroanilines are preferred;

[0990] b10) from the group of the VLCFA inhibitors:

[0991] chloroacetamides such as acetochlor, alachlor, butachlor, dimethachlor, dimethenamid, dimethenamid-P, metazachlor, metolachlor, metolachlor-S, pethoxamid, pretilachlor, propachlor, propisochlor and thenylchlor, oxyacetanilides such as flufenacet and mefenacet, acetanilides such as diphenamid, naproanilide, napropamide and napropamide-M, tetrazolinones such fentrazamide, and other herbicides such as anilofos, cafenstrole, fenoxasulfone, ipfencarbazone, piperophos, pyroxasulfone and isoxazoline compounds of the formulae II.1, II.2, II.3, II.4, II.5, II.6, II.7, II.8 and II.9

[chemical structure]

[0992] the isoxazoline compounds of the formula (I)I are known in the art, e.g. from WO 2006/024820, WO 2006/037945, WO 2007/071900 and WO 2007/096576;

[0993] among the VLCFA inhibitors, preference is given to chloroacetamides and oxyacetamides;

[0994] b11) from the group of the cellulose biosynthesis inhibitors:

[0995] chlorthiamid, dichlobenil, flupoxam, isoxaben and 1-Cyclohexyl-5-pentafluorphenyloxy-1⁴-[1,2,4,6]thiatriazin-3-ylamine;

[0996] b12) from the group of the decoupler herbicides:

[0997] dinoseb, dinoterb and DNOC and its salts;

[0998] b13) from the group of the auxinic herbicides:

[0999] 2,4-D and its salts and esters such as clacyfos, 2,4-DB and its salts and esters, aminocyclopyrachlor and its salts and esters, aminopyralid and its salts such as aminopyralid-dimethylammonium, aminopyralid-tris(2-hydroxypropyl)ammonium and its esters, benazolin, benazolin-ethyl, chloramben and its salts and esters, clomeprop, clopyralid and its salts and esters, dicamba and its salts and esters, dichlorprop and its salts and esters, dichlorprop-P and its salts and esters, fluroxypyr, fluroxypyr-butometyl, fluroxypyr-meptyl, halauxifen and its salts and esters (CAS 943832-60-8); MCPA and its salts and esters, MCPA-thioethyl, MCPB and its salts and esters, mecoprop and its salts and esters, mecoprop-P and its salts and esters, picloram and its salts and esters, quinclorac, quinmerac, TBA (2,3,6) and its salts and esters and triclopyr and its salts and esters;

[1000] b14) from the group of the auxin transport inhibitors: diflufenzopyr, diflufenzopyr-sodium, naptalam and naptalam-sodium;

[1001] b15) from the group of the other herbicides: bromobutide, chlorflurenol, chlorflurenol-methyl, cinmethylin, cumyluron, cyclopyrimorate (CAS 499223-49-3) and its salts and esters, dalapon, dazomet, difenzoquat, difenzoquat-metilsulfate, dimethipin, DSMA, dymron, endothal and its salts, etobenzanid, flamprop, flamprop-isopropyl, flamprop-methyl, flamprop-M-isopropyl, flamprop-M-methyl, flurenol, flurenol-butyl, flurprimidol, fosamine, fosamine-ammonium, indanofan, indaziflam, maleic hydrazide, mefluidide, metam, methiozolin (CAS 403640-27-7), methyl azide, methyl bromide, methyl-dymron, methyl iodide, MSMA, oleic acid, oxaziclomefone, pelargonic acid, pyributicarb, quinoclamine, triaziflam and tridiphane.

[1002] Active compounds B and C having a carboxyl group can be employed in the form of the acid, in the form of an agriculturally suitable salt as mentioned above or else in the form of an agriculturally acceptable derivative in the compositions according to the invention.

[1003] In the case of dicamba, suitable salts include those, where the counterion is an agriculturally acceptable cation. For example, suitable salts of dicamba are dicamba-sodium, dicamba-potassium, dicamba-methylammonium, dicamba-dimethylammonium, dicamba-isopropylammonium, dicamba-diglycolamine, dicamba-olamine, dicamba-diolamine, dicamba-trolamine, dicamba-N,N-bis-(3-aminopropyl)methylamine and dicamba-diethylenetriamine. Examples of a suitable ester are dicamba-methyl and dicamba-butotyl.

[1004] Suitable salts of 2,4-D are 2,4-D-ammonium, 2,4-D-dimethylammonium, 2,4-D-diethylammonium, 2,4-D-diethanolammonium (2,4-D-diolamine), 2,4-D-triethanol-ammonium, 2,4-D-isopropylammonium, 2,4-D-triisopropanolammonium, 2,4-D-heptylammonium, 2,4-D-dodecylammonium, 2,4-D-tetradecylammonium, 2,4-D-triethylammonium, 2,4-D-tris(2-hydroxypropyl)ammonium, 2,4-D-tris(isopropyl)ammonium, 2,4-D-trolamine, 2,4-D-lithium, 2,4-D-sodium. Examples of suitable esters of 2,4-D are 2,4-D-butotyl, 2,4-D-2-butoxypropyl, 2,4-D-3-butoxypropyl, 2,4-D-butyl, 2,4-D-ethyl, 2,4-D-ethylhexyl, 2,4-D-isobutyl, 2,4-D-isooctyl, 2,4-D-isopropyl, 2,4-D-meptyl, 2,4-D-methyl, 2,4-D-octyl, 2,4-D-pentyl, 2,4-D-propyl, 2,4-D-tefuryl and clacyfos.

[1005] Suitable salts of 2,4-DB are for example 2,4-DB-sodium, 2,4-DB-potassium and 2,4-DB-dimethylammonium. Suitable esters of 2,4-DB are for example 2,4-DB-butyl and 2,4-DB-isoctyl.

[1006] Suitable salts of dichlorprop are for example dichlorprop-sodium, dichlorprop-potassium and dichlorprop-dimethylammonium. Examples of suitable esters of dichlorprop are dichlorprop-butotyl and dichlorprop-isoctyl.

[1007] Suitable salts and esters of MCPA include MCPA-butotyl, MCPA-butyl, MCPA-dimethylammonium, MCPA-diolamine, MCPA-ethyl, MCPA-thioethyl, MCPA-2-ethylhexyl, MCPA-isobutyl, MCPA-isoctyl, MCPA-isopropyl, MCPA-isopropylammonium, MCPA-methyl, MCPA-olamine, MCPA-potassium, MCPA-sodium and MCPA-trolamine.

[1008] A suitable salt of MCPB is MCPB sodium. A suitable ester of MCPB is MCPB-ethyl.

[1009] Suitable salts of clopyralid are clopyralid-potassium, clopyralid-olamine and clopyralid-tris-(2-hydroxypropyl)ammonium. Example of suitable esters of clopyralid is clopyralid-methyl.

[1010] Examples of a suitable ester of fluroxypyr are fluroxypyr-meptyl and fluroxypyr-2-butoxy-1-methylethyl, wherein fluroxypyr-meptyl is preferred.

[1011] Suitable salts of picloram are picloram-dimethylammonium, picloram-potassium, picloram-triisopropanolammonium, picloram-triisopropylammonium and picloram-trolamine. A suitable ester of picloram is picloram-isoctyl.

[1012] A suitable salt of triclopyr is triclopyr-triethylammonium. Suitable esters of triclopyr are for example triclopyr-ethyl and triclopyr-butotyl.

[1013] Suitable salts and esters of chloramben include chloramben-ammonium, chloramben-diolamine, chloramben-methyl, chloramben-methylammonium and chloramben-sodium.

[1014] Suitable salts and esters of 2,3,6-TBA include 2,3,6-TBA-dimethylammonium, 2,3,6-TBA-lithium, 2,3,6-TBA-potassium and 2,3,6-TBA-sodium.

[1015] Suitable salts and esters of aminopyralid include aminopyralid-potassium, aminopyralid-dimethylammonium, and aminopyralid-tris(2-hydroxypropyl)ammonium.

[1016] Suitable salts of glyphosate are for example glyphosate-ammonium, glyphosate-diammonium, glyphoste-dimethylammonium, glyphosate-isopropylammonium, glyphosate-potassium, glyphosate-sodium, glyphosate-trimesium as well as the ethanolamine and diethanolamine salts, preferably glyphosate-diammonium, glyphosate-isopropylammonium and glyphosate-trimesium (sulfosate).

[1017] A suitable salt of glufosinate is for example glufosinate-ammonium.

[1018] A suitable salt of glufosinate-P is for example glufosinate-P-ammonium.

[1019] Suitable salts and esters of bromoxynil are for example bromoxynil-butyrate, bromoxynil-heptanoate, bromoxynil-octanoate, bromoxynil-potassium and bromoxynil-sodium.

[1020] Suitable salts and esters of ioxonil are for example ioxonil-octanoate, ioxonil-potassium and ioxonil-sodium.

[1021] Suitable salts and esters of mecoprop include mecoprop-butotyl, mecoprop-dimethylammonium, mecoprop-diolamine, mecoprop-ethadyl, mecoprop-2-ethylhexyl, mecoprop-isoctyl, mecoprop-methyl, mecoprop-potassium, mecoprop-sodium and mecoprop-trolamine.

[1022] Suitable salts of mecoprop-P are for example mecoprop-P-butotyl, mecoprop-P-dimethylammonium, mecoprop-P-2-ethylhexyl, mecoprop-P-isobutyl, mecoprop-P-potassium and mecoprop-P-sodium.

[1023] A suitable salt of diflufenzopyr is for example diflufenzopyr-sodium.

[1024] A suitable salt of naptalam is for example naptalam-sodium.

[1025] Suitable salts and esters of aminocyclopyrachlor are for example aminocyclopyrachlor-dimethylammonium, aminocyclopyrachlor-methyl, aminocyclopyrachlor-triisopropanolammonium, aminocyclopyrachlor-sodium and aminocyclopyrachlor-potassium.

[1026] A suitable salt of quinclorac is for example quinclorac-dimethylammonium.

[1027] A suitable salt of quinmerac is for example quinclorac-dimethylammonium.

[1028] A suitable salt of imazamox is for example imazamox-ammonium.

[1029] Suitable salts of imazapic are for example imazapic-ammonium and imazapic-isopropylammonium.

[1030] Suitable salts of imazapyr are for example imazapyr-ammonium and imazapyr-isopropylammonium.

[1031] A suitable salt of imazaquin is for example imazaquin-ammonium.

[1032] Suitable salts of imazethapyr are for example imazethapyr-ammonium and imazethapyr-isopropylammonium.

[1033] A suitable salt of topramezone is for example topramezone-sodium.

[1034] Particularly preferred herbicidal compounds B are the herbicides B as defined above; in particular the herbicides B.1-B.189 listed below in table B:

TABLE B

| Herbicide B | |
|---|---|
| B.1 | clethodim |
| B.2 | clodinafop-propargyl |
| B.3 | cycloxydim |
| B.4 | cyhalofop-butyl |
| B.5 | fenoxaprop-ethyl |
| B.6 | fenoxaprop-P-ethyl |
| B.7 | metamifop |
| B.8 | pinoxaden |
| B.9 | profoxydim |
| B.10 | sethoxydim |
| B.11 | tepraloxydim |
| B.12 | tralkoxydim |
| B.13 | esprocarb |
| B.14 | ethofumesate |
| B.15 | molinate |
| B.16 | prosulfocarb |
| B.17 | thiobencarb |
| B.18 | triallate |
| B.19 | bensulfuron-methyl |
| B.20 | bispyribac-sodium |
| B.21 | cloransulam-methyl |
| B.22 | chlorsulfuron |
| B.23 | clorimuron |
| B.24 | cyclosulfamuron |
| B.25 | diclosulam |
| B.26 | florasulam |
| B.27 | flumetsulam |
| B.28 | flupyrsulfuron-methyl-sodiurn |
| B.29 | foramsulfuron |
| B.30 | imazamox |
| B.31 | imazamox-ammonium |
| B.32 | imazapic |
| B.33 | imazapic-ammonium |
| B.34 | imazapic-isopropylammonium |
| B.35 | imazapyr |
| B.36 | imazapyr-ammonium |
| B.37 | imazapyr-isopropylammonium |
| B.38 | imazaquin |
| B.39 | imazaquin-ammonium |
| B.40 | imazethapyr |
| B.41 | imazethapyr-ammonium |
| B.42 | imazethapyr- |
| | isopropylammonium |
| B.43 | imazosulfuron |
| B.44 | iodosulfuron-methyl-sodium |
| B.45 | iofensulfuron |
| B.46 | iofensulfuron-sodium |
| B.47 | mesosulfuron-methyl |
| B.48 | metazosulfuron |
| B.49 | metsulfuron-methyl |
| B.50 | metosulam |
| B.51 | nicosulfuron |
| B.52 | penoxsulam |
| B.53 | propoxycarbazon-sodium |
| B.54 | pyrazosulfuron-ethyl |
| B.55 | pyribenzoxim |
| B.56 | pyriftalid |
| B.57 | pyroxsulam |
| B.58 | propyrisulfuron |
| B.59 | rimsulfuron |
| B.60 | sulfosulfuron |
| B.61 | thiencarbazone-methyl |
| B.62 | thifensulfuron-methyl |
| B.63 | tribenuron-methyl |
| B.64 | tritosulfuron |
| B.65 | triafamone |
| B.66 | ametryne |
| B.67 | atrazine |
| B.68 | bentazon |
| B.69 | bromoxynil |
| B.70 | bromoxynil-octanoate |
| B.71 | bromoxynil-heptanoate |
| B.72 | bromoxynil-potassium |
| B.73 | diuron |
| B.74 | fluometuron |
| B.75 | hexazinone |
| B.76 | isoproturon |
| B.77 | linuron |
| B.78 | metamitron |
| B.79 | metribuzin |
| B.80 | propanil |
| B.81 | simazin |
| B.82 | terbuthylazine |
| B.83 | terbutryn |
| B.84 | paraquat-dichloride |
| B.85 | acifluorfen |
| B.86 | butafenacil |
| B.87 | carfentrazone-ethyl |
| B.88 | flumioxazin |
| B.89 | fomesafen |
| B.90 | oxadiargyl |
| B.91 | oxyfluorfen |
| B.92 | saflufenacil |
| B.93 | sulfentrazone |
| B.94 | ethyl [3-[2-chloro-4-fluoro-5- |
| | (1-methyl-6-trifluoromethyl- |
| | 2,4-dioxo-1,2,3,4-tetrahydro- |
| | pyrimidin-3-yl)phenoxy]-2- |
| | pyridyloxy]acetate (CAS |
| | 353292-31-6) |
| B.95 | 1,5-dimethyl-6-thioxo-3-(2,2,7- |
| | trifluoro-3-oxo-4-(prop-2-ynyl)- |
| | 3,4-dihydro-2H-benzo[b][1,4]- |
| | oxazin-6-yl)-1,3,5-triazinane- |
| | 2,4-dione (CAS 1258836-72-4) |
| B.96 | benzobicyclon |
| B.97 | clomazone |
| B.98 | diflufenican |
| B.99 | flurochloridone |
| B.100 | isoxaflutole |
| B.101 | mesotrione |
| B.102 | norflurazone |
| B.103 | picolinafen |
| B.104 | sulcotrione |
| B.105 | tefuryltrione |
| B.106 | tembotrione |
| B.107 | topramezone |
| B.108 | topramezone-sodium |
| B.109 | bicyclopyrone |
| B.110 | amitrole |
| B.111 | fluometuron |
| B.112 | fenquintrione |
| B.113 | glyphosate |
| B.114 | glyphosate-ammonium |
| B.115 | glyphosate- |
| | dimethylammonium |
| B.116 | glyphosate- |
| | isopropylammonium |
| B.117 | glyphosate-trimesium |
| | (sulfosate) |
| B.118 | glyphosate-potassium |
| B.119 | glufosinate |
| B.120 | glufosinate-ammonium |
| B.121 | glufosinate-P |
| B.122 | glufosinate-P-ammonium |
| B.123 | pendimethalin |
| B.124 | trifluralin |
| B.125 | acetochlor |
| B.126 | butachlor |
| B.127 | cafenstrole |
| B.128 | dimethenamid-P |
| B.129 | fentrazamide |
| B.130 | flufenacet |
| B.131 | mefenacet |
| B.132 | metazachlor |
| B.133 | metolachlor |
| B.134 | S-metolachlor |
| B.135 | pretilachlor |
| B.136 | fenoxasulfone |
| B.137 | isoxaben |
| B.138 | ipfencarbazone |
| B.139 | pyroxasulfone |
| B.140 | 2,4-D |
| B.141 | 2,4-D-isobutyl |
| B.142 | 2,4-D-dimethylammonium |
| B.143 | 2,4-D-N,N,N- |
| | trimethylethanolammonium |
| B.144 | aminopyralid |
| B.145 | aminopyralid-methyl |
| B.146 | aminopyralid-dimethyl- |
| | ammonium |
| B.147 | aminopyralid-tris(2- |
| | hydroxypropyl)ammonium |
| B.148 | clopyralid |
| B.149 | clopyralid-methyl |
| B.150 | clopyralid-olamine |
| B.151 | dicamba |
| B.152 | dicamba-butotyl |
| B.153 | dicamba-diglycolamine |
| B.154 | dicamba-dimethylammonium |
| B.155 | dicamba-diolamine |
| B.156 | dicamba-isopropylammonium |
| B.157 | dicamba-potassium |
| B.158 | dicamba-sodium |
| B.159 | dicamba-trolamine |
| B.160 | dicamba-N,N-bis-(3- |
| | aminopropyl)methylamine |
| B.161 | dicamba-diethylenetriamine |
| B.162 | fluroxypyr |
| B.163 | fluroxypyr-meptyl |
| B.164 | MCPA |
| B.165 | MCPA-2-ethylhexyl |
| B.166 | MCPA-dimethylammonium |
| B.167 | quinclorac |
| B.168 | quinclorac-dimethylammonium |
| B.169 | quinmerac |
| B.170 | quinmerac- |
| | dimethylammonium |
| B.171 | aminocyclopyrachlor |
| B.172 | aminocyclopyrachlor-potassium |
| B.173 | aminocyclopyrachlor-methyl |
| B.174 | diflufenzopyr |
| B.175 | diflufenzopyr-sodium |
| B.176 | dymron |
| B.177 | indanofan |
| B.178 | indaziflam |
| B.179 | oxaziclomefone |
| B.180 | triaziflam |
| B.181 | II.1 |
| B.182 | II.2 |
| B.183 | II.3 |
| B.184 | II.4 |
| B.185 | II.5 |
| B.186 | II.6 |
| B.187 | II.7 |
| B.188 | II.8 |
| B.189 | II.9 |

[1035] Moreover, it may be useful to apply the compounds of formula (I) in combination with safeners and optionally with one or more further heribicides. Safeners are chemical compounds which prevent or reduce damage on useful plants without having a major impact on the herbicidal action of the compounds of the formula (I) towards unwanted plants. They can be applied either before sowings (e.g. on seed treatments, shoots or seedlings) or in the pre-emergence application or post-emergence application of the useful plant. The safeners and the compounds of formula (I) and optionally the herbicides B can be applied simultaneously or in succession.

[1036] Suitable safeners are e.g. (quinolin-8-oxy)acetic acids, 1-phenyl-5-haloalkyl-1H-1,2,4-triazol-3-carboxylic acids, 1-phenyl-4,5-dihydro-5-alkyl-1H-pyrazol-3,5-dicarboxylic acids, 4,5-dihydro-5,5-diaryl-3-isoxazol carboxylic acids, dichloroacetamides, alpha-oximinophenylacetonitriles, acetophenonoximes, 4,6-dihalo-2-phenylpyrimidines, N-[[4-(aminocarbonyl)phenyl]sulfonyl]-2-benzoic amides, 1,8-naphthalic anhydride, 2-halo-4-(haloalkyl)-5-thiazol carboxylic acids, phosphorthiolates and N-alkyl-O-phenylcarbamates and their agriculturally acceptable salts and their agriculturally acceptable derivatives such amides, esters, and thioesters, provided they have an acid group.

[1037] Examples of preferred safeners C are benoxacor, cloquintocet, cyometrinil, cyprosulfamide, dichlormid, dicyclonon, dietholate, fenchlorazole, fenclorim, flurazole, fluxofenim, furilazole, isoxadifen, mefenpyr, mephenate, naphthalic anhydride, oxabetrinil, 4-(dichloroacetyl)-1-oxa-4-azaspiro[4.5]decane (MON4660, CAS 71526-07-3), 2,2,5-trimethyl-3-(dichloroacetyl)-1,3-oxazolidine (R-29148, CAS 52836-31-4) and N-(2-Methoxybenzoyl)-4-[(methylaminocarbonyl)amino]benzenesulfonamide (CAS 129531-12-0).

[1038] Particularly preferred safeners C are the following compounds C.1 to C.17

| | | | |
|---|---|---|---|
| C.1 | benoxacor | C.2 | cloquintocet |
| C.3 | cloquintocet-mexyl | C.4 | cyprosulfamide |
| C.5 | dichlormid | C.6 | fenchlorazole |
| C.7 | fenchlorazole-ethyl | C.8 | fenclorim |
| C.9 | furilazole | C.10 | isoxadifen |
| C.11 | isoxadifen-ethyl | C.12 | mefenpyr |
| C.13 | mefenpyr-diethyl | C.14 | naphtalic acid anhydride |
| C.15 | 4-(dichloroacetyl)-1-oxa-4- | C.16 | 2,2,5-trimethyl-3-(dichloro- |
| | azaspiro[4.5]decane | | acetyl)-1,3-oxazolidine |
| C.17 | N-(2-Methoxybenzoyl)-4- | | |
| | [(methylaminocarbonyl)amino] | | |
| | benzenesulfonamide | | |

[1039] The active compounds B of groups b1) to b15) and the safener compounds C are known herbicides and safeners, see, for example, The Compendium of Pesticide Common Names (http://www.alanwood.net/pesticides/); Farm Chemicals Handbook 2000 volume 86, Meister Publishing Company, 2000; B. Hock, C. Fedtke, R. R. Schmidt, Herbizide [Herbicides], Georg Thieme Verlag, Stuttgart 1995; W. H. Ahrens, Herbicide Handbook, 7th edition, Weed Science Society of America, 1994; and K. K. Hatzios, Herbicide Handbook, Supplement for the 7th edition, Weed Science Society of America, 1998. 2,2,5-Trimethyl-3-(dichloroacetyl)-1,3-oxazolidine [CAS No. 52836-31-4] is also referred to as R-29148. 4-(Dichloroacetyl)-1-oxa-4-azaspiro[4.5]decane [CAS No. 71526-07-3] is also referred to as AD-67 and MON 4660.

[1040] The assignment of the active compounds to the respective mechanisms of action is based on current knowledge. If several mechanisms of action apply to one active compound, this substance was only assigned to one mechanism of action.

[1041] It is generally preferred to use the compounds of the invention in combination with herbicides that are selective for the crop being treated and which complement the spectrum of weeds controlled by these compounds at the application rate employed. It is further generally preferred to apply the compounds of the invention and other complementary herbicides at the same time, either as a combination formulation or as a tank mix.

[1042] In another embodiment, the present invention refers to a method for identifying a CESA-inhibiting herbicide by using a mutated CESA encoded by a nucleic acid which comprises the nucleotide sequence of SEQ ID NO: 84, 85, 86, 87, 88, 89, 90, 91, 92, 93, 94, 95, 96, 97, or 98, or a variant or derivative thereof.

[1043] Said method comprises the steps of:
[1044] a) generating a transgenic cell or plant comprising a nucleic acid encoding a mutated CESA, wherein the mutated CESA is expressed;
[1045] b) applying a CESA-inhibiting herbicide to the transgenic cell or plant of a) and to a control cell or plant of the same variety;
[1046] c) determining the growth or the viability of the transgenic cell or plant and the control cell or plant after application of said CESA-inhibiting herbicide, and
[1047] d) selecting “CESA-inhibiting herbicides” which confer reduced growth to the control cell or plant as compared to the growth of the transgenic cell or plant.

[1048] As described above, the present invention teaches compositions and methods for increasing the CESA-inhibiting tolerance of a crop plant or seed as compared to a wild-type variety of the plant or seed. In a preferred embodiment, the CESA-inhibiting tolerance of a crop plant or seed is increased such that the plant or seed can withstand a CESA-inhibiting herbicide application of preferably approximately 1-1000 g ai ha⁻¹, more preferably 1-200 g ai ha⁻¹, even more preferably 5-150 g ai ha⁻¹, and most preferably 10-100 g ai ha⁻¹. As used herein, to “withstand” a CESA-inhibiting herbicide application means that the plant is either not killed or only moderately injured by such application. It will be understood by the person skilled in the art that the application rates may vary, depending on the environmental conditions such as temperature or humidity, and depending on the chosen kind of herbicide (active ingredient ai).

[1049] Pre- and/or Post-emergent weed control methods useful in various embodiments hereof utilize about >0.3× application rates of CESA-inhibiting herbicides; in some embodiments, this can be about, for example, >0.3×, >0.4×, >0.5×, >0.6×, >0.7×, >0.8×, >0.9×, or >1× of CESA-inhibiting herbicides. In one embodiment, CESA-inhibiting herbicides-tolerant plants of the present invention have tolerance to a pre- and/or post-emergant application of a CESA-inhibiting herbicides at an amount of about 25 to about 500 g ai/ha. In some embodiments, wherein the CESA-inhibiting herbicides-tolerant plant is a dicot (e.g., soy, cotton), the pre- and/or post-emergant application of the CESA-inhibiting herbicides is at an amount of about 25-250 g ai/ha. In another embodiment, wherein the CESA-inhibiting herbicides-tolerant plant is a monocot (e.g., maize, rice, sorghum), the pre- and/or post-emergant application of the CESA-inhibiting herbicides is at an amount of about 50-500 g ai/ha. In other embodiments, wherein the CESA-inhibiting herbicides-tolerant plant is a Brassica (e.g., canola), the pre- and/or post-emergant application of the CESA-inhibiting herbicides is at an amount of about 25-200 g ai/ha. In pre- and/or post-emergent weed control methods hereof, in some embodiments, the method can utilize CESA-inhibiting herbicides application rates at pre-emergent and/or about 7 to 10 days post-emergent. In another embodiment, the application rate can exceed 8×CESA-inhibiting herbicides; in some embodiments, the rate can be up to 4×CESA-inhibiting herbicides, though more typically it will be about 2.5× or less, or about 2× or less, or about 1× or less.

[1050] Furthermore, the present invention provides methods that involve the use of at least one CESA-inhibiting herbicide, optionally in combination with one or more herbicidal compounds B, and, optionally, a safener C, as described in detail supra.

[1051] In these methods, the CESA-inhibiting herbicide can be applied by any method known in the art including, but not limited to, seed treatment, soil treatment, and foliar treatment. Prior to application, the CESA-inhibiting herbicide can be converted into the customary formulations, for example solutions, emulsions, suspensions, dusts, powders, pastes and granules. The use form depends on the particular intended purpose; in each case, it should ensure a fine and even distribution of the compound according to the invention.

[1052] By providing plants having increased tolerance to CESA-inhibiting herbicide, a wide variety of formulations can be employed for protecting plants from weeds, so as to enhance plant growth and reduce competition for nutrients. A CESA-inhibiting herbicide can be used by itself for pre-emergence, post-emergence, pre-planting, and at-planting control of weeds in areas surrounding the crop plants described herein, or a CESA-inhibiting herbicide formulation can be used that contains other additives. The CESA-inhibiting herbicide can also be used as a seed treatment. Additives found in a CESA-inhibiting herbicide formulation include other herbicides, detergents, adjuvants, spreading agents, sticking agents, stabilizing agents, or the like. The CESA-inhibiting herbicide formulation can be a wet or dry preparation and can include, but is not limited to, flowable powders, emulsifiable concentrates, and liquid concentrates. The CESA-inhibiting herbicide and herbicide formulations can be applied in accordance with conventional methods, for example, by spraying, irrigation, dusting, or the like.

[1053] Suitable formulations are described in detail in PCT/EP2009/063387 and PCT/EP2009/063386, which are incorporated herein by reference.

[1054] As disclosed herein, the CESA nucleic acids of the invention find use in enhancing the CBI herbicide tolerance of plants that comprise in their genomes a gene encoding a herbicide-tolerant mutated CESA protein. Such a gene may be an endogenous gene or a transgene, as described above. Additionally, in certain embodiments, the nucleic acids of the present invention can be stacked with any combination of polynucleotide sequences of interest in order to create plants with a desired phenotype. For example, the nucleic acids of the present invention may be stacked with any other polynucleotides encoding polypeptides having pesticidal and/or insecticidal activity, such as, for example, the Bacillus thuringiensis toxin proteins (described in U.S. Pat. Nos. 5,366,892; 5,747,450; 5,737,514; 5,723,756; 5,593,881; and Geiser et al (1986) Gene 48: 109), 5-enolpyruvylshikimate-3-phosphate synthase (EPSPS), Glyphosate acetyl transferase (GAT), cytochrome P450 monooxygenase, phosphinothricin acetyltransferase (PAT), Acetohydroxyacid synthase (AHAS; EC 4.1.3.18, also known as acetolactate synthase or ALS), hydroxyphenyl pyruvate dioxygenase (HPPD), Phytoene desaturase (PD), Protoporphyrinogen oxidase (PPO) and dicamba degrading enzymes as disclosed in WO 02/068607, or phenoxyaceticacid- and phenoxypropionicacid-derivative degrading enzymes as disclosed in WO 2008141154 or WO 2005107437. The combinations generated can also include multiple copies of any one of the polynucleotides of interest.

[1055] Consequently, Herbicide-tolerant plants of the invention can be used in conjunction with an herbicide to which they are tolerant. Herbicides can be applied to the plants of the invention using any techniques known to those skilled in the art. Herbicides can be applied at any point in the plant cultivation process. For example, herbicides can be applied pre-planting, at planting, pre-emergence, post-emergence or combinations thereof. Herbicides may be applied to seeds and dried to form a layer on the seeds.

[1056] In some embodiments, seeds are treated with a safener, followed by a post-emergent application of a CESA-inhibiting herbicides. In one embodiment, the post-emergent application of the CESA-inhibiting herbicides is about 7 to 10 days following planting of safener-treated seeds. In some embodiments, the safener is cloquintocet, dichlormid, fluxofenim, or combinations thereof.

[1057] Methods of Controlling Weeds or Undesired Vegetation

[1058] In other aspects, the present invention provides a method for controlling weeds at a locus for growth of a plant or plant part thereof, the method comprising: applying a composition comprising a CESA-inhibiting herbicides to the locus.

[1059] In some aspects, the present invention provides a method for controlling weeds at a locus for growth of a plant, the method comprising: applying an herbicide composition comprising CESA-inhibiting herbicides to the locus; wherein said locus is: (a) a locus that contains: a plant or a seed capable of producing said plant; or (b) a locus that is to be after said applying is made to contain the plant or the seed; wherein the plant or the seed comprises in at least some of its cells a polynucleotide operably linked to a promoter operable in plant cells, the promoter capable of expressing a mutated CESA polypeptide encoded by the polynucleotide, the expression of the mutated CESA polypeptide conferring to the plant tolerance to CESA-inhibiting herbicides.

[1060] Herbicide compositions hereof can be applied, e.g., as foliar treatments, soil treatments, seed treatments, or soil drenches. Application can be made, e.g., by spraying, dusting, broadcasting, or any other mode known useful in the art.

[1061] In one embodiment, herbicides can be used to control the growth of weeds that may be found growing in the vicinity of the herbicide-tolerant plants invention. In embodiments of this type, an herbicide can be applied to a plot in which herbicide-tolerant plants of the invention are growing in vicinity to weeds. An herbicide to which the herbicide-tolerant plant of the invention is tolerant can then be applied to the plot at a concentration sufficient to kill or inhibit the growth of the weed. Concentrations of herbicide sufficient to kill or inhibit the growth of weeds are known in the art and are disclosed above.

[1062] In other embodiments, the present invention provides a method for controlling weeds in the vicinity of a CESA-inhibiting herbicides-tolerant plant of the invention. The method comprises applying an effective amount of a CESA-inhibiting herbicides to the weeds and to the herbicide-tolerant plant, wherein the plant has increased tolerance to CESA-inhibiting herbicide when compared to a wild-type plant. In some embodiments, the CESA-inhibiting herbicides-tolerant plants of the invention are preferably crop plants, including, but not limited to, sunflower, alfalfa, Brassica sp., soybean, cotton, safflower, peanut, tobacco, tomato, potato, wheat, rice, maize, sorghum, barley, rye, millet, and sorghum.

[1063] In other aspects, herbicide(s) (e.g., CESA-inhibiting herbicides) can also be used as a seed treatment. In some embodiments, an effective concentration or an effective amount of herbicide(s), or a composition comprising an effective concentration or an effective amount of herbicide(s) can be applied directly to the seeds prior to or during the sowing of the seeds. Seed Treatment formulations may additionally comprise binders and optionally colorants.

[1064] Binders can be added to improve the adhesion of the active materials on the seeds after treatment. In one embodiments, suitable binders are block copolymers EO/PO surfactants but also polyvinylalcoholsl, polyvinylpyrrolidones, polyacrylates, polymethacrylates, polybutenes, polyisobutylenes, polystyrene, polyethyleneamines, polyethyleneamides, polyethyleneimines (Lupasol®, Polymin®), polyethers, polyurethans, polyvinylacetate, tylose and copolymers derived from these polymers. Optionally, also colorants can be included in the formulation. Suitable colorants or dyes for seed treatment formulations are Rhodamin B, C.I. Pigment Red 112, C.I. Solvent Red 1, pigment blue 15:4, pigment blue 15:3, pigment blue 15:2, pigment blue 15: 1, pigment blue 80, pigment yellow 1, pigment yellow 13, pigment red 1 12, pigment red 48:2, pigment red 48: 1, pigment red 57: 1, pigment red 53:1, pigment orange 43, pigment orange 34, pigment orange 5, pigment green 36, pigment green 7, pigment white 6, pigment brown 25, basic violet 10, basic violet 49, acid red 51, acid red 52, acid red 14, acid blue 9, acid yellow 23, basic red 10, basic red 108.

[1065] The term seed treatment comprises all suitable seed treatment techniques known in the art, such as seed dressing, seed coating, seed dusting, seed soaking, and seed pelleting. In one embodiment, the present invention provides a method of treating soil by the application, in particular into the seed drill: either of a granular formulation containing the CESA-inhibiting herbicides as a composition/formulation (e.g., a granular formulation), with optionally one or more solid or liquid, agriculturally acceptable carriers and/or optionally with one or more agriculturally acceptable surfactants. This method is advantageously employed, for example, in seedbeds of cereals, maize, cotton, and sunflower.

[1066] The present invention also comprises seeds coated with or containing with a seed treatment formulation comprising CESA-inhibiting herbicides and at least one other herbicide such as, e.g., an AHAS-inhibitor selected from the group consisting of amidosulfuron, azimsulfuron, bensulfuron, chlorimuron, chlorsulfuron, cinosulfuron, cyclosulfamuron, ethametsulfuron, ethoxysulfuron, flazasulfuron, flupyrsulfuron, foramsulfuron, halosulfuron, imazosulfuron, iodosulfuron, mesosulfuron, metsulfuron, nicosulfuron, oxasulfuron, primisulfuron, prosulfuron, pyrazosulfuron, rimsulfuron, sulfometuron, sulfosulfuron, thifensulfuron, triasulfuron, tribenuron, trifloxysulfuron, triflusulfuron, tritosulfuron, imazamethabenz, imazamox, imazapic, imazapyr, imazaquin, imazethapyr, cloransulam, diclosulam, florasulam, flumetsulam, metosulam, penoxsulam, bispyribac, pyriminobac, propoxycarbazone, flucarbazone, pyribenzoxim, pyriftalid and pyrithiobac.

[1067] The term “coated with and/or containing” generally signifies that the active ingredient is for the most part on the surface of the propagation product at the time of application, although a greater or lesser part of the ingredient may penetrate into the propagation product, depending on the method of application. When the said propagation product is (re)planted, it may absorb the active ingredient.

[1068] In some embodiments, the seed treatment application with CESA-inhibiting herbicides or with a formulation comprising the CESA-inhibiting herbicides is carried out by spraying or dusting the seeds before sowing of the plants and before emergence of the plants.

[1069] In other embodiments, in the treatment of seeds, the corresponding formulations are applied by treating the seeds with an effective amount of CESA-inhibiting herbicides or a formulation comprising the CESA-inhibiting herbicides.

[1070] In other aspects, the present invention provides a method for combating undesired vegetation or controlling weeds comprising contacting the seeds of the CESA-inhibiting herbicides-tolerant plants of the present invention before sowing and/or after pregermination with CESA-inhibiting herbicides. The method can further comprise sowing the seeds, for example, in soil in a field or in a potting medium in greenhouse. The method finds particular use in combating undesired vegetation or controlling weeds in the immediate vicinity of the seed. The control of undesired vegetation is understood as the killing of weeds and/or otherwise retarding or inhibiting the normal growth of the weeds. Weeds, in the broadest sense, are understood as meaning all those plants which grow in locations where they are undesired.

[1071] The weeds of the present invention include, for example, dicotyledonous and monocotyledonous weeds. Dicotyledonous weeds include, but are not limited to, weeds of the genera: Sinapis, Lepiclium, Galium, Stellaria, Matricaria, Anthemis, Galinsoga, Chenopodium, Urtica, Senecio, Amaranthus, Portulaca, Xanthium, Convolvulus, Ipomoea, Polygonum, Sesbania, Ambrosia, Cirsium, Carduus, Sonchus, Solarium, Rorippa, Rotala, Lindernia, Lamium, Veronica, Abutilon, Emex, Datura, Viola, Galeopsis, Papaver, Centaurea, Trifolium, Ranunculus, and Taraxacum. Monocotyledonous weeds include, but are not limited to, weeds of the genera: Echinochloa, Setaria, Panicum, Digitaria, Phleum, Poa, Festuca, Eleusine, Brachiaria, Lolium, Bromus, Avena, Cyperus, Sorghum, Agropyron, Cynodon, Monochoria, Fimbristyslis, Sagittaria, Eleocharis, Scirpus, Paspalum, Ischaemum, Sphenoclea, Dactyloctenium, Agrostis, Alopecurus, and Apera.

[1072] In addition, the weeds of the present invention can include, for example, crop plants that are growing in an undesired location. For example, a volunteer maize plant that is in a field that predominantly comprises soybean plants can be considered a weed, if the maize plant is undesired in the field of soybean plants.

[1073] In other embodiments, in the treatment of seeds, the corresponding formulations are applied by treating the seeds with an effective amount of CESA-inhibiting herbicides or a formulation comprising the CESA-inhibiting herbicides.

[1074] In still further aspects, treatment of loci, plants, plant parts, or seeds of the present invention comprises application of an agronomically acceptable composition that does not contain an A.I. In one embodiment, the treatment comprises application of an agronomically acceptable composition that does not contain a CESA-inhibiting herbicides A.I. In some embodiments, the treatment comprises application of an agronomically acceptable composition that does not contain a CESA-inhibiting herbicides A.L, wherein the composition comprises one or more of agronomically-acceptable carriers, diluents, excipients, plant growth regulators, and the like. In other embodiments, the treatment comprises application of an agronomically acceptable composition that does not contain a CESA-inhibiting herbicides A.I., wherein the composition comprises an adjuvant. In one embodiment, the adjuvant is a surfactant, a spreader, a sticker, a penetrant, a drift-control agent, a crop oil, an emulsifier, a compatibility agent, or combinations thereof.

[1075] It should also be understood that the foregoing relates to preferred embodiments of the present invention and that numerous changes may be made therein without departing from the scope of the invention. The invention is further illustrated by the following examples, which are not to be construed in any way as imposing limitations upon the scope thereof. On the contrary, it is to be clearly understood that resort may be had to various other embodiments, modifications, and equivalents thereof, which, after reading the description herein, may suggest themselves to those skilled in the art without departing from the spirit of the present invention and/or the scope of the appended claims.

### EXAMPLES

### Example 1: Identification of Cellulose Biosynthesis Inhibitor (CBI; CESA Inhibitor) Resistant Plants

[1076] For selection of cellulose biosynthesis inhibitor resistant plants EMS mutagenized seed populations of Arabidopsis thaliana are used. EMS mutagenized seed populations are either bought from Lehle Seeds (1102 South Industrial Blvd. Suite D, Round Rock, Tex. USA) or are generated as described elsewhere (Heim D R, et. al. (1989) Plant Physiol. 90: 146-150). Causative mutations in CESA wildtype sequences (e.g. SEQ ID NO: 1 or 3) are identified as described by Scheible W R et. al. (2001, Proc. Natl. Acad. of Sci. 98: 10079-10084), McCourt et. al. (WO2013/142968) or with the use of next generation sequencing methods as described by Austin R S, et. al. (2011) Plant Journal 67: 715-725.

[1077] Selected Arabidopsis thaliana lines were assayed for improved resistance to azines like 6-cyclopentyl-N4-(2,3,4,5,6-pentafluorophenyl)-1,3,5-triazine-2,4-diamine; 6-(1-fluoro-1-methyl-ethyl)-N4-(2,3,4,5,6-pentafluorophenyl)-1,3,5-triazine-2,4-diamine; 6-cyclohexyl-N2-(2,3,4,5,6-pentafluorophenyl)-1,3,5-triazine-2,4-diamine; 6-(2,6-difluorophenyl)-N2-(2,3,5,6-tetrafluorophenyl)-1,3,5-triazine-2,4-diamine; N2-(4-chloro-3,5,6-trifluoro-2-pyridyl)-6-(1-fluoro-1-methyl-ethyl)-1,3,5-triazine-2,4-diamine in 48-well plates. Therefore, M2 or M3 seeds are surface sterilized by stirring for 5 min in ethanol+water (70+30 by volume), rinsing one time with ethanol+water (70+30 by volume) and two times with sterile, deionized water. The seeds are resuspended in 0.1% agar dissolved in water (w/v) Four to five seeds per well are plated on solid nutrient medium consisting of half-strength murashige skoog nutrient solution, pH 5.8 (Murashige and Skoog (1962) Physiologia Plantarum 15: 473-497). Compounds are dissolved in dimethylsulfoxid (DMSO) and added to the medium prior solidification (final DMSO concentration 0.1%). Multi well plates are incubated in a growth chamber at 22° C., 75% relative humidity and 110 μmol Phot*m⁻²*s⁻¹ with 14:10 h light: dark photoperiod. Growth inhibition is evaluated seven to ten days after seeding in comparison to wild type plants. Tolerance factors are calculated based on IC50 values of growth inhibition of transformed versus non-transformed or non-mutated Arabidopsis plants.

[1078] Additionally, M3 Arabidopsis seeds are tested for improved tolerance to CESA-inhibiting herbicides in greenhouse studies with azine compounds like e. g. N2-(4-chloro-3,5,6-trifluoro-2-pyridyl)-6-(1-fluorocyclopentyl)-1,3,5-triazine-2,4-diamine (Table E1-1, see also FIG. 3).

TABLE E1-1
M3 seeds containing a variant of Arabidopsis thaliana CESA gene. Plants were treated
pre-emergent with the indicated amount of the mentioned compound and evaluated
for injury 21 days after treatment. Shown are the phytotox values of several events.

| | | wildtype | At_CESA1_R292H | |
|---|---|---|---|---|
| | Event:/ | | (SEQ ID 1- | |
| | application | | Variant R292H) | |
| Compound | rate [g ai/ha] | | A | B |
| 1-[4-chloro-3-(2,2,3,3,3- | 250 | 100 | 100 | 100 |
| pentafluoropropoxymethyl)phenyl]- | 125 | 100 | 100 | 100 |
| 5-phenyl-1,2,4-triazole-3-carboxamide | 31.25 | 99 | 80 | 52.5 |
| | 7.8 | 12.5 | 7.5 | 25 |
| N2-(4-chloro-3,5,6-trifluoro-2-pyridyl)-6- | 4 | 100 | 94 | 87.5 |
| (1-fluorocyclopentyl)-1,3,5-triazine-2,4-diamine | 2 | 98 | 45 | 17.5 |
| | 1 | 65 | 10 | 0 |
| | 0.5 | 60 | 10 | 5 |

### Example 2: Engineering Azine-Tolerant Arabidopsis Plants Having Wildtype or Mutated Cellulose Synthase Sequences

[1079] For transformation of Arabidopsis thaliana, wildtype or mutated cellulose synthase sequences encoding for one of the following protein sequences SEQ ID NO: 1 or 3, are cloned with standard cloning techniques as described in Sambrook et al. (Molecular cloning (2001) Cold Spring Harbor Laboratory Press) in a binary vector containing resistance marker gene cassette (AHAS) and mutated cellulose synthase sequence (marked as GOD in between ubiquitin promoter (PcUbi) and nopaline synthase terminator (NOS) sequence. Binary plasmids are introduced to Agrobacterium tumefaciens for plant transformation. Arabidopsis thaliana are transformed with wildtype or mutated cellulose synthase sequences by floral dip method as decribed by McElver and Singh (WO 2008/124495). Transgenic Arabidopsis plants are subjected to TaqMan analysis for analysis of the number of integration loci.

[1080] The tolerance phenotype evaluation of transgenic T1 Arabidopsis thaliana plants germinating on sand with an azine-herbicide are done 14-21 days after germination.

[1081] Transgenic Arabidopsis thaliana plants (T2) are assayed for improved tolerance to azine herbicides like e. g. 6-cyclopentyl-N4-(2,3,4,5,6-pentafluorophenyl)-1,3,5-triazine-2,4-diamine in 48-well plates. Therefore, T2 seeds are surface sterilized by stirring for 5 min in ethanol+water (70+30 by volume), rinsing one time with ethanol+water (70+30 by volume) and two times with sterile, deionized water. The seeds are resuspended in 0.1% agar dissolved in water (w/v) Four to five seeds per well are plated on solid nutrient medium consisting of half-strength murashige skoog nutrient solution, pH 5.8 (Murashige and Skoog (1962) Physiologia Plantarum 15: 473-497). Compounds are dissolved in dimethylsulfoxid (DMSO) and added to the medium prior solidification (final DMSO concentration 0.1%). Multi well plates are incubated in a growth chamber at 22° C., 75% relative humidity and 110 μmol Phot*m⁻²*s⁻¹ with 14: 10 h light: dark photoperiod. Growth inhibition is evaluated seven to ten days after seeding in comparison to wild type plants. Tolerance factors are calculated based on IC50 values of growth inhibition of transformed versus non-transformed Arabidopsis plants.

### Example 3: Identification of Homologue Cellulose Synthase Isoforms in Crop Plants

[1082] To identify homologue cellulose synthase genes from soy, corn and rice, BLAST searches using the protein sequences of Arabidopsis thaliana cellulose synthase isoforms were performed (Altschul et al. (1990) J Mol Biol 215: 403-10). Cellulose synthase protein encoding genes from corn, soy, rice, Brassica napus and sunflower were analyzed regarding their phylogenetic relationship by the R software library phangorn (Schliep K P. (2011) Bioinformatics 27: 592-593). Bootstrap analyses to statistically confirm monophyletic groups were calculated. In addition genes were classified by their expression level and expression pattern (Hruz T, et. al. (2008) Adv. in Bioinformatics 2008: 1-5) (FIGS. 1-3) and selected for plant transformation. For plants species not available in Gen investigator the genes are selected as follows. A cDNA library of of e.g. Brassica napus seedlings were sequenced with one lane Illumina HiSeq2000 with a 2×100 bp paired end run using TruSeq SBS Kit v3 (FC-401-3001 Illumina Inc. San Diego, Calif. USA). The sequencing raw data were analyzed with FASTQC quality checker (Babraham Bioinformatics 2014), trimmed using EA-Utils fastq-mcf (https://code.google.com/p/ea-utils/) and further analyzed to remove any Illumina adaptor sequences using CutAdapt coding (http://code.google.com/p/cutadapt/). For relative expression analysis of the cellulose synthase genes in e.g. Brassica napus, reads were mapped using TopHat2 (Kim et al. 2013) and counted using HTseq count (Anders et al. 2015).

### Example 4: Tissue Culture Conditions

[1083] An in vitro tissue culture mutagenesis assay is developed to isolate and characterize plant tissue (e.g., maize, rice) that is tolerant to cellulose synthase inhibiting herbicides, (e. g. 6-cyclopentyl-N4-(2,3,4,5,6-pentafluorophenyl)-1,3,5-triazine-2,4-diamine, and photosynthesis inhibitor diuron as negative control). The assay utilizes the somaclonal variation that is found in in vitro tissue culture. Spontaneous mutations derived from somaclonal variation can be enhanced by chemical mutagenesis (e. g. ethylmethane sulfonate; ethylethane sulfonate, N-nitroso-N-ethyl urea, ethylnitrosourea, nitrose acid, bromouracil, 2.-aminopurine, 5-fluorodeoxyuridine, hydroxylamine, N-methyl-N′-nitro-N-nitrosoguanidine) and subsequent selection in a stepwise manner, on increasing concentrations of herbicide.

[1084] The present invention provides tissue culture conditions for encouraging growth of friable, embryogenic maize or rice callus that is regenerable. Calli are initiated from 4 different maize or rice cultivars encompassing Zea mays and Japonica (Taipei 309, Nipponbare, Koshihikari) and Indica (Indica 1) varieties, respectively. Seeds are surface sterilized in 70% ethanol for approximately 1 min followed by 20% commercial Clorox bleach for 20 minutes. Seeds are rinsed with sterile water and plated on callus induction media. Various callus induction media are tested. The ingredient lists for the media tested are presented in Table E4-1.

TABLE E4-1

| Ingredient | Supplier | R001M | | R025M | | R026M | | R327M | | R008M | | MS711R | |
|---|---|---|---|---|---|---|---|---|---|---|---|---|---|
| B5 Vitamins | Sigma | | | | | | | | | 1.0 | X | | |
| MS salts | Sigma | | | | | 1.0 | X | 1.0 | X | 1.0 | X | 1.0 | X |
| MS Vitamins | Sigma | | | | | 1.0 | X | 1.0 | X | | | | |
| N6 salts | Phytotech | 4.0 | g/L | 4.0 | g/L | | | | | | | | |
| N6 vitamins | Phytotech | 1.0 | X | 1.0 | X | | | | | | | | |
| L-Proline | Sigma | 2.9 | g/L | 0.5 | g/L | | | | | | | 1.2 | g/L |
| Casamino Acids | BD | 0.3 | g/L | 0.3 | g/L | 2 | g/L | | | | | | |
| Casein | Sigma | | | | | | | | | | | 1.0 | g/L |
| Hydrolysate | | | | | | | | | | | | | |
| L-Asp | Phytotech | | | | | | | | | | | 150 | mg/L |
| Monohydrate | | | | | | | | | | | | | |
| Nicotinic Acid | Sigma | | | | | | | | | | | 0.5 | mg/L |
| Pyridoxine HCl | Sigma | | | | | | | | | | | 0.5 | mg/L |
| Thiamine HCl | Sigma | | | | | | | | | | | 1.0 | mg/L |
| Myo-inositol | Sigma | | | | | | | | | | | 100 | mg/L |
| MES | Sigma | 500 | mg/L | 500 | mg/L | 500 | mg/L | 500 | mg/L | 500 | mg/L | 500 | mg/L |
| Maltose | VWR | 30 | g/L | 30 | g/L | 30 | g/L | 30 | g/L | | | | |
| Sorbitol | Duchefa | | | | | 30 | g/L | | | | | | |
| Sucrose | VWR | | | | | | | | | 10 | g/L | 30 | g/L |
| NAA | Duchefa | | | | | | | | | 50 | μg/L | | |
| 2,4-D | Sigma | 2.0 | mg/L | | | | | | | | | 1.0 | mg/L |
| MgCl₂•6H₂O | VWR | | | | | | | | | 750 | mg/L | | |
| →pH | | 5.8 | | 5.8 | | 5.8 | | 5.8 | | 5.8 | | 5.7 | |
| Gelrite | Duchefa | 4.0 | g/L | | | | | | | 2.5 | g/L | | |
| Agarose Type1 | Sigma | | | 7.0 | g/L | 10 | g/L | 10 | g/L | | | | |
| →Autoclave | | 15 | min | 15 | min | 15 | min | 15 | min | 15 | min | 20 | min |

| | | | | | | | |
|---|---|---|---|---|---|---|---|
| Kinetin | Sigma | 2.0 | mg/L | 2.0 | mg/L | | |
| NAA | Duchefa | 1.0 | mg/L | 1.0 | mg/L | | |
| ABA | Sigma | 5.0 | mg/L | | | | |
| Cefotaxime | Duchefa | 0.1 | g/L | 0.1 | g/L | 0.1 | g/L |
| Vancomycin | Duchefa | 0.1 | g/L | 0.1 | g/L | 0.1 | g/L |
| G418 Disulfate | Sigma | 20 | mg/L | 20 | mg/L | 20 | mg/L |

[1085] R001M callus induction media was selected after testing numerous variations. Cultures were kept in the dark at 30° C. Embryogenic callus was subcultured to fresh media after 10-14 days.

### Example 5: Selection of Azine-Herbicide-Tolerant Calli

[1086] Once tissue culture conditions were determined, further establishment of selection conditions are established through the analysis of tissue survival in kill curves with azine herbicides e. g. like 6-cyclopentyl-N4-(2,3,4,5,6-pentafluorophenyl)-1,3,5-triazine-2,4-diamine, and photosynthesis inhibitor diuron as negative control. Careful consideration of accumulation of the herbicide in the tissue, as well as its persistence and stability in the cells and the culture media are performed. Through these experiments, a sub-lethal dose is established for the initial selection of mutated material. After the establishment of the starting dose of azine herbicides like e. g. 6-cyclopentyl-N4-(2,3,4,5,6-pentafluorophenyl)-1,3,5-triazine-2,4-diamine, and photosynthesis inhibitor diuron as negative control in selection media, the tissues were selected in a step-wise fashion by increasing the concentration of the cellulose synthase inhibitor with each transfer until cells are recovered that grew vigorously in the presence of toxic doses. The resulting calli are further subcultured every 3-4 weeks to R001M with selective agent. Over 26,000 calli are subjected to selection for 4-5 subcultures until the selective pressure is above toxic levels as determined by kill curves and observations of continued culture. Alternatively, liquid cultures initiated from calli in MS711R with slow shaking and weekly subcultures. Once liquid cultures are established, selection agent is added directly to the flask at each subculture. Following 2-4 rounds of liquid selection, cultures are transferred to filters on solid R001M media for further growth.

### Example 6: Regeneration of Plants

[1087] Tolerant tissue is regenerated and characterized molecularly for cellulose synthase gene sequences mutations. In addition, genes involved directly and/or indirectly in cell wall biosynthesis and/or metabolism pathways are also sequenced to characterize mutations. Finally, enzymes that change the fate (e.g. metabolism, translocation, transportation) are also sequenced to characterize mutations. Following herbicide selection, calli are regenerated using a media regime of R025M for 10-14 days, R026M for ca. 2 weeks, R327M until well formed shoots were developed, and R008S until shoots are well rooted for transfer to the greenhouse. Regeneration was carried out in the light. No selection agent is included during regeneration. Once strong roots are established, M0 regenerants are transplant to the greenhouse in square or round pots. Transplants are maintained under a clear plastic cup until they were adapted to greenhouse conditions. The greenhouse was set to a day/night cycle of 27° C./21° C. (80° F./70° F.) with 600 W high pressure sodium lights supplementing light to maintain a 14 hour day length. Plants are watered according to need, depending in the weather and fertilized daily.

### Example 7: Sequence Analysis

[1088] Leaf tissue is collected from clonal plants separated for transplanting and analyzed as individuals. Genomic DNA is extracted using a Wizard® 96 Magnetic DNA Plant System kit (Promega, U.S. Pat. Nos. 6,027,945 & 6,368,800) as directed by the manufacturer. Isolated DNA is PCR amplified using the appropriate forward and reverse primer. PCR amplification is performed using Hotstar Taq DNA Polymerase (Qiagen) using touchdown thermocycling program as follows: 96° C. for 15 min, followed by 35 cycles (96° C., 30 sec; 58° C.-0.2° C. per cycle, 30 sec; 72° C., 3 min and 30 sec), 10 min at 72° C. PCR products were verified for concentration and fragment size via agarose gel electrophoresis. Dephosphorylated PCR products are analyzed by direct sequence using the PCR primers (DNA Landmarks). Chromatogram trace files (.scf) are analyzed for mutation relative to the wild-type gene using Vector NTI Advance 10™ (Invitrogen). Based on sequence information, mutations are identified in several individuals. Sequence analysis is performed on the representative chromatograms and corresponding AlignX alignment with default settings and edited to call secondary peaks.

### Example 8: Soybean Transformation and Cellulose Biosynthesis Inhibitor Tolerance Testing

[1089] Binary vectors are generated as described in EXAMPLE 2. Soybean cv Jake are transformed as previously described by Siminszky et al., Phytochem Rev. 5:445-458 (2006). After regeneration, transformants are transplanted to soil in small pots, placed in growth chambers (16 hr day/8 hr night; 25° C. day/23° C. night; 65% relative humidity; 130-150 microE m-2 s-1) and subsequently tested for the presence of the T-DNA via Taqman analysis. After a few weeks, healthy, transgenic positive, single copy events are transplanted to larger pots and allowed to grow in the growth chamber. An optimal shoot for cutting is about 3-4 inches tall, with at least two nodes present. Each cutting is taken from the original transformant (mother plant) and dipped into rooting hormone powder (indole-3-butyric acid, IBA). The cutting is then placed in oasis wedges inside a bio-dome. The mother plant is taken to maturity in the greenhouse and harvested for seed. Wild type cuttings are also taken simultaneously to serve as negative controls. The cuttings are kept in the bio-dome for 5-7 days. 3-4 days after transfer to oasis wedges, the shoots are treated via nutrient solution with the herbicide. Typical phytotox symptoms, like club shaped root, are evaluated 3-4 days after treatment. Less or no injury of transgenic plants compared to wildtype plants are interpreted as herbicide tolerance.

### Example 9: Engineering Cellulose Biosynthesis Inhibitor Tolerant Corn or Rice Plants Having Mutated Cellulose Synthase Sequences

[1090] Immature embryos can be transformed according to the procedure outlined in Peng et al. (WO2006/136596). Plants are tested for the presence of the T-DNA by Taqman analysis with the target being the nos terminator which is present in all constructs. Healthy looking plants are sent to the greenhouse for hardening and subsequent spray testing. The plants are individually transplanted into MetroMix 360 soil in 4″ pots. Once in the greenhouse (day/night cycle of 27° C./21° C. with 14 hour day length supported by 600 W high pressure sodium lights), they are allowed to grow for 14 days. Transformation of Oryza sativa (rice) are done by protoplast transformation as described by Peng et al. (U.S. Pat. No. 6,653,529). Transgenic corn and rice plants are cultivated to T1 seeds for herbicide tolerance testing.

### Example 10: Demonstration of Herbicide Tolerance of Mutagenized Rice Lines

[1091] Oryza sativa M2 Volano is a cellulose biosynthesis inhibitor susceptible rice risotto population that was subjected to sodium azide seed mutagenesis but was not tilled nor selected for CESA mutations. O. sativa Volano-M3-CESA1 and CESA3 mutants were selected from a subpopulation of O. sativa M2 Volano by sequencing CESA gene sequences in M2 plants and maintaining (producing seed through selfing) those individuals containing key mutations in these genes. The tolerance of the M3 CESA1 and CESA3 mutants was assessed using 6-(1-fluorocyclopentyl)-N2-(2,3,5,6-tetrafluorophenyl)-1,3,5-triazine-2,4-diamine, together with 1.0% DASH® EC adjuvant (BASF). The tolerance of M4 CESA1 and CESA3 mutants was assessed using 6-cyclopentyl-N4-(2,3,4,5,6-pentafluorophenyl)-1,3,5-triazine-2,4-diamine, together with 1.0% DASH® EC adjuvant (BASF).

[1092] M3 seed, which were harvested from tilled and selected individuals containing mutations in the CESA1 and CESA3 genes, were grown in the greenhouse under natural light conditions supplemented with 400 W sodium halide lamps under a 16 hr daylength. Day/night temperatures were 26 and 20° C., respectively. The number of M3 plants from each line varied between 2 and 16, depending on seed availability and germination. A non-selective CBI, azine 6-(1-fluorocyclopentyl)-N2-(2,3,5,6-tetrafluorophenyl)-1,3,5-triazine-2,4-diamine, formulated with 1.0% DASH in a water volume of 375 L/ha was applied early post-emergent (one to two leaf stage) at a rate of 250 g ai/ha to M3 CESA1 and CESA3 mutant rice plants growing in soil in the greenhouse. Only plants originating from lines having more than four seeds were subjected to herbicide treatment. CESA mutant lines with four or fewer seeds were selfed for an additional generation and then tested at the M4 generation with 6-cyclopentyl-N4-(2,3,4,5,6-pentafluorophenyl)-1,3,5-triazine-2,4-diamine. M4 plants were grown under similar conditions as M3 plants and treated with 250 g ai/ha or 500 g ai/ha of 6-cyclopentyl-N4-(2,3,4,5,6-pentafluorophenyl)-1,3,5-triazine-2,4-diamine. Previous kill curve greenhouse tests had identified that a rate of 250 g ai/ha of 6-(1-fluorocyclopentyl)-N2-(2,3,5,6-tetrafluorophenyl)-1,3,5-triazine-2,4-diamine and a rate of 250 g ai/ha 6-cyclopentyl-N4-(2,3,4,5,6-pentafluorophenyl)-1,3,5-triazine-2,4-diamine, both with 1.0% DASH, were sufficient doses to kill O. sativa M2 Volano check plants. The plants were subjected to an evenly applied herbicide application in a greenhouse spray cabinet equipped with TeeJet® Extended Range spray nozzles (XR110015-V). Plants were assessed for crop injury, using a scale from 0% injury to 100% injury, at 11 and 21 days after treatment (DAT) for M3 plants applied with 6-(1-fluorocyclopentyl)-N2-(2,3,5,6-tetrafluorophenyl)-1,3,5-triazine-2,4-diamine and 36 DAT for M4 plants applied with 6-cyclopentyl-N4-(2,3,4,5,6-pentafluorophenyl)-1,3,5-triazine-2,4-diamine. Plants without any symptoms were recorded as “0%” injury. Increasing levels of reduced leaf mass and reduced stalk stiffness, with respect to the untreated control plants, were recorded in the range of “1 to 49%” injury. Increasing levels of leaf abnormalities and leaf necrosis, along with increased levels of lodging, relative to the untreated control plants, were recorded in the range of “50 to 85%” injury. Dead or dying plants with necrosis of the apex and severe lodging were recorded between “86-100%”. Data on individual plants was assessed and recorded due to the low number of individuals per line and the fact that the CESA mutations in the M2 generation were heterozygous and therefore segregating at the M3 and M4 generations. The presence and zygosity of the CESA mutations were confirmed in surviving M3 and M4 plants by DNA sequencing.

TABLE E10-1
Crop injury on tilled Rice M3 generation cellulose synthase
mutants and wild type materials after foliar application of
250 g ai/ha of 6-(1-fluorocyclopentyl)-N2-(2,3,5,6-
tetrafluorophenyl)-1,3,5-triazine-2,4-diamine,
herbicide at 20 days after treatment (DAT).

| | | | Zygosity | |
|---|---|---|---|---|
| | | | of | Crop Injury |
| | | | Mutation | Assessment |
| | | Mutation/ | in Parental | (%) at 20 |
| SEQ ID | Gene | Variant | Plant | DAT |
| — | OsCESA | [symbol] WT | — | 100% |
| — | OsCESA | WT | — | 100% |
| — | OsCESA | WT | — | 100% |
| — | OsCESA | WT | — | 100% |
| 51 | OsCESA1 | A1066T | [symbol] Het | 10% |
| 51 | OsCESA1 | S827N | Het | 0% |
| 51 | OsCESA1 | V923I | Het | 0% |
| 51 | OsCESA1 | V923I | Het | 0% |
| 51 | OsCESA1 | V923I | Het | 0% |
| 55 | OsCESA3 | V1022L | [symbol] Hom | 20% |

[symbol]

WT = wild type (no polymorphism in native gene)
Het = heterozygous for the mutation as confirmed by DNA sequencing
Hom = homozygous for the mutation as confirmed by DNA sequencing

TABLE E10-2
Crop injury on tilled Rice M4 generation cellulose synthase mutants and wild
type materials after foliar application of 250 g ai/ha or 500 g ai/ha of 6-cyclopentyl-N4-
(2,3,4,5,6-pentafluorophenyl)-1,3,5-triazine-2,4-diamine, herbicide at 23 and 36 days after
treatment (DAT).

| | | | Zygosity of | Rate of | Crop injury | Crop injury |
|---|---|---|---|---|---|---|
| | | | mutation in | herbicide | assessment | assessment |
| | | | parental | selection [g ai/ | (%) at 23 | (%) at 36 |
| SEQ ID | Gene | Mutation | plant | ha] | DAT | DAT |
| — | OsCESA | [symbol] WT | — | 250 | 75% | 70% |
| — | OsCESA | WT | — | 250 | 65% | 95% |
| — | OsCESA | WT | — | 500 | 98% | 100% |
| — | OsCESA | WT | — | 500 | 95% | 100% |
| 51 | OsCesA1 | T952I | [symbol] Het | 250 | 0% | 0% |
| 51 | OsCesA1 | T952I | Het | 250 | 0% | 15% |
| 51 | OsCesA1 | T952I | Het | 250 | 0% | 35% |
| 51 | OsCesA1 | T952I | Het | 500 | 10% | 10% |
| 51 | OsCesA1 | A1066T | Het | 250 | 0% | 10% |
| 51 | OsCesA1 | A1066T | Het | 250 | 35% | 25% |
| 51 | OsCesA1 | S827N | Hom | 250 | 0% | 0% |

WT = wild type (no polymorphism in native gene) [symbol]
Het = heterozygous for the mutation as confirmed by DNA sequencing
Hom = homozygous for the mutation as confirmed by DNA sequencing

### Example 11: Demonstration of Herbicide Tolerance

[1093] TO or T1 transgenic plant of soybean, corn, rice, sunflower and Brassica napus containing cellulose synthase sequences or mutated gene variants thereof are tested for improved tolerance to herbicides in greenhouse studies and mini-plot studies with azine herbicides. For the pre-emergence treatment, the herbicides are applied directly after sowing by means of finely distributing nozzles. The containers are irrigated gently to promote germination and growth and subsequently covered with transparent plastic hoods until the plants have rooted. This cover causes uniform germination of the test plants, unless this has been impaired by the herbicides. For post emergence treatment, the test plants are first grown to a height of 3 to 15 cm, depending on the plant habit, and only then treated with the herbicides. For this purpose, the test plants are either, sown directly and grown in the same containers or they are first grown separately and transplanted into the test containers a few days prior to treatment.

[1094] Herbicide injury evaluations are taken at 2 and 3 weeks after treatment. Plant injury is rated on a scale of 0% to 100%, 0% being no injury and 100% being complete death.

The application's sequence listing, which the Patent Office published only in electronic form, follows.

SEQUENCE LISTING (122 sequences)

SEQ ID NO: 1 - protein, 1081 aa, Arabidopsis thaliana
MEASAGLVAGSYRRNELVRIRHESDGGTKPLKNMNGQICQICGDDVGLAETGDVFVACNECAFPVCRPCYEYERKDGTQCCPQCKTRFRRHRGSPRVEGDEDEDDVDDIENEFNYAQGANKARHQRHGEEFSSSSRHESQPIPLLTHGHTVSGEIRTPDTQSVRTTSGPLGPSDRNAISSPYIDPRQPVPVRIVDPSKDLNSYGLGNVDWKERVEGWKLKQEKNMLQMTGKYHEGKGGEIEGTGSNGEELQMADDTRLPMSRVVPIPSSRLTPYRVVIILRLIILCFFLQYRTTHPVKNAYPLWLTSVICEIWFAFSWLLDQFPKWYPINRETYLDRLAIRYDRDGEPSQLVPVDVFVSTVDPLKEPPLVTANTVLSILSVDYPVDKVACYVSDDGSAMLTFESLSETAEFAKKWVPFCKKFNIEPRAPEFYFAQKIDYLKDKIQPSFVKERRAMKREYEEFKVRINALVAKAQKIPEEGWTMQDGTPWPGNNTRDHPGMIQVFLGHSGGLDTDGNELPRLIYVSREKRPGFQHHKKAGAMNALIRVSAVLTNGAYLLNVDCDHYFNNSKAIKEAMCFMMDPAIGKKCCYVQFPQRFDGIDLHDRYANRNIVFFDINMKGLDGIQGPVYVGTGCCFNRQALYGYDPVLTEEDLEPNIIVKSCCGSRKKGKSSKKYNYEKRRGINRSDSNAPLFNMEDIDEGFEGYDDERSILMSQRSVEKRFGQSPVFIAATFMEQGGIPPTTNPATLLKEAIHVISCGYEDKTEWGKEIGWIYGSVTEDILTGFKMHARGWISIYCNPPRPAFKGSAPINLSDRLNQVLRWALGSIEILLSRHCPIWYGYHGRLRLLERIAYINTIVYPITSIPLIAYCILPAFCLITDRFIIPEISNYASIWFILLFISIAVTGILELRWSGVSIEDWWRNEQFWVIGGTSAHLFAVFQGLLKVLAGIDTNFTVTSKATDEDGDFAELYIFKWTALLIPPTTVLLVNLIGIVAGVSYAVNSGYQSWGPLFGKLFFALWVIAHLYPFLKGLLGRQNRTPTIVIVWSVLLASIFSLLWVRINPFVDANPNANNFNGKGGVF

SEQ ID NO: 2 - protein, 1084 aa, Arabidopsis thaliana
MNTGGRLIAGSHNRNEFVLINADESARIRSVQELSGQTCQICGDEIELTVSSELFVACNECAFPVCRPCYEYERREGNQACPQCKTRYKRIKGSPRVDGDDEEEEDIDDLEYEFDHGMDPEHAAEAALSSRLNTGRGGLDSAPPGSQIPLLTYCDEDADMYSDRHALIVPPSTGYGNRVYPAPFTDSSAPPQARSMVPQKDIAEYGYGSVAWKDRMEVWKRRQGEKLQVIKHEGGNNGRGSNDDDELDDPDMPMMDEGRQPLSRKLPIRSSRINPYRMLILCRLAILGLFFHYRILHPVNDAYGLWLTSVICEIWFAVSWILDQFPKWYPIERETYLDRLSLRYEKEGKPSGLAPVDVFVSTVDPLKEPPLITANTVLSILAVDYPVDKVACYVSDDGAAMLTFEALSDTAEFARKWVPFCKKFNIEPRAPEWYFSQKMDYLKNKVHPAFVRERRAMKRDYEEFKVKINALVATAQKVPEEGWTMQDGTPWPGNNVRDHPGMIQVFLGHSGVRDTDGNELPRLVYVSREKRPGFDHHKKAGAMNSLIRVSAVLSNAPYLLNVDCDHYINNSKAIRESMCFMMDPQSGKKVCYVQFPQRFDGIDRHDRYSNRNVVFFDINMKGLDGIQGPIYVGTGCVFRRQALYGFDAPKKKKPPGKTCNCWPKWCCLCCGLRKKSKTKAKDKKTNTKETSKQIHALENVDEGVIVPVSNVEKRSEATQLKLEKKFGQSPVFVASAVLQNGGVPRNASPACLLREAIQVISCGYEDKTEWGKEIGWIYGSVTEDILTGFKMHCHGWRSVYCMPKRAAFKGSAPINLSDRLHQVLRWALGSVEIFLSRHCPIWYGYGGGLKWLERFSYINSVVYPWTSLPLIVYCSLPAVCLLTGKFIVPEISNYAGILFMLMFISIAVTGILEMQWGGVGIDDWWRNEQFWVIGGASSHLFALFQGLLKVLAGVNTNFTVTSKAADDGAFSELYIFKWTTLLIPPTTLLIINIIGVIVGVSDAISNGYDSWGPLFGRLFFALWVIVHLYPFLKGMLGKQDKMPTIIVVWSILLASILTLLWVRVNPFVAKGGPVLEICGLNCGN

SEQ ID NO: 3 - protein, 1065 aa, Arabidopsis thaliana
MESEGETAGKPMKNIVPQTCQICSDNVGKTVDGDRFVACDICSFPVCRPCYEYERKDGNQSCPQCKTRYKRLKGSPAIPGDKDEDGLADEGTVEFNYPQKEKISERMLGWHLTRGKGEEMGEPQYDKEVSHNHLPRLTSRQDTSGEFSAASPERLSVSSTIAGGKRLPYSSDVNQSPNRRIVDPVGLGNVAWKERVDGWKMKQEKNTGPVSTQAASERGGVDIDASTDILADEALLNDEARQPLSRKVSIPSSRINPYRMVIMLRLVILCLFLHYRITNPVPNAFALWLVSVICEIWFALSWILDQFPKWFPVNRETYLDRLALRYDREGEPSQLAAVDIFVSTVDPLKEPPLVTANTVLSILAVDYPVDKVSCYVSDDGAAMLSFESLAETSEFARKWVPFCKKYSIEPRAPEWYFAAKIDYLKDKVQTSFVKDRRAMKREYEEFKIRINALVSKALKCPEEGWVMQDGTPWPGNNTRDHPGMIQVFLGQNGGLDAEGNELPRLVYVSREKRPGFQHHKKAGAMNALVRVSAVLTNGPFILNLDCDHYINNSKALREAMCFLMDPNLGKQVCYVQFPQRFDGIDKNDRYANRNTVFFDINLRGLDGIQGPVYVGTGCVFNRTALYGYEPPIKVKHKKPSLLSKLCGGSRKKNSKAKKESDKKKSGRHTDSTVPVFNLDDIEEGVEGAGFDDEKALLMSQMSLEKRFGQSAVFVASTLMENGGVPPSATPENLLKEAIHVISCGYEDKSDWGMEIGWIYGSVTEDILTGFKMHARGWRSIYCMPKLPAFKGSAPINLSDRLNQVLRWALGSVEILFSRHCPIWYGYNGRLKFLERFAYVNTTIYPITSIPLLMYCTLPAVCLFTNQFIIPQISNIASIWFLSLFLSIFATGILEMRWSGVGIDEWWRNEQFWVIGGVSAHLFAVFQGILKVLAGIDTNFTVTSKASDEDGDFAELYLFKWTTLLIPPTTLLIVNLVGVVAGVSYAINSGYQSWGPLFGKLFFAFWVIVHLYPFLKGLMGRQNRTPTIVVVWSVLLASIFSLLWVRIDPFTSRVTGPDILECGINC

SEQ ID NO: 4 - protein, 1049 aa, Arabidopsis thaliana
MEPNTMASFDDEHRHSSFSAKICKVCGDEVKDDDNGQTFVACHVCVYPVCKPCYEYERSNGNKCCPQCNTLYKRHKGSPKIAGDEENNGPDDSDDELNIKYRQDGSSIHQNFAYGSENGDYNSKQQWRPNGRAFSSTGSVLGKDFEAERDGYTDAEWKERVDKWKARQEKRGLVTKGEQTNEDKEDDEEEYLDAEARQPLWRKVPISSSKISPYRIVIVLRLVILVFFFRFRILTPAKDAYPLWLISVICEIWFALSWILDQFPKWFPINRETYLDRLSMRFERDGEKNKLAPVDVFVSTVDPLKEPPIITANTILSILAVDYPVNKVSCYVSDDGASMLLFDTLSETSEFARRWVPFCKKYNVEPRAPEFYFSEKIDYLKDKVQTTFVKDRRAMKREYEEFKVRINALVAKAQKKPEEGWVMQDGTPWPGNNTRDHPGMIQVYLGKEGAFDIDGNELPRLVYVSREKRPGYAHHKKAGAMNAMVRVSAVLTNAPFMLNLDCDHYINNSKAIRESMCFLMDPQLGKKLCYVQFPQRFDGIDLNDRYANRNIVFFDINMRGLDGIQGPVYVGTGCVFNRPALYGYEPPVSEKRKKMTCDCWPSWICCCCGGGNRNHKSDSSKKKSGIKSLFSKLKKKTKKKSDDKTMSSYSRKRSSTEAIFDLEDIEEGLEGYDELEKSSLMSQKNFEKRFGMSPVFIASTLMENGGLPEATNTSSLIKEAIHVISCGYEEKTEWGKEIGWIYGSVTEDILTGFRMHCRGWKSVYCMPKRPAFKGSAPINLSDRLHQVLRWALGSVEIFFSRHCPLWYAWGGKLKILERLAYINTIVYPFTSIPLLAYCTIPAVCLLTGKFIIPTINNFASIWFLALFLSIIATAILELRWSGVSINDLWRNEQFWVIGGVSAHLFAVFQGLLKVLFGVDTNFTVTSKGASDEADEFGDLYLFKWTTLLIPPTTLIILNMVGVVAGVSDAINNGYGSWGPLFGKLFFAFWVIVHLYPFLKGLMGRQNRTPTIVVLWSILLASIFSLVWVRIDPFLPKQTGPLLKQCGVDC

SEQ ID NO: 5 - protein, 1069 aa, Arabidopsis thaliana
MNTGGRLIAGSHNRNEFVLINADESARIRSVEELSGQTCQICGDEIELSVDGESFVACNECAFPVCRPCYEYERREGNQSCPQCKTRYKRIKGSPRVEGDEEDDGIDDLDFEFDYSRSGLESETFSRRNSEFDLASAPPGSQIPLLTYGEEDVEISSDSHALIVSPSPGHIHRVHQPHFPDPAAHPRPMVPQKDLAVYGYGSVAWKDRMEEWKRKQNEKYQVVKHDGDSSLGDGDDADIPMMDEGRQPLSRKVPIKSSKINPYRMLIVLRLVILGLFFHYRILHPVNDAYALWLISVICEIWFAVSWVLDQFPKWYPIERETYLDRLSLRYEKEGKPSELAGVDVFVSTVDPMKEPPLITANTVLSILAVDYPVDRVACYVSDDGAAMLTFEALSETAEFARKWVPFCKKYTIEPRAPEWYFCHKMDYLKNKVHPAFVRERRAMKRDYEEFKVKINALVATAQKVPEEGWTMQDGTPWPGNNVRDHPGMIQVFLGNNGVRDVENNELPRLVYVSREKRPGFDHHKKAGAMNSLIRVSGVLSNAPYLLNVDCDHYINNSKALREAMCFMMDPQSGKKICYVQFPQRFDGIDKSDRYSNRNVVFFDINMKGLDGLQGPIYVGTGCVFRRQALYGFDAPKKKKTKRMTCNCWPKWCLFCCGLRKNRKSKTTDKKKKNREASKQIHALENIEEGTKGTNDAAKSPEAAQLKLEKKFGQSPVFVASAGMENGGLARNASPASLLREAIQVISCGYEDKTEWGKEIGWIYGSVTEDILTGFKMHSHGWRSVYCTPKIPAFKGSAPINLSDRLHQVLRWALGSVEIFLSRHCPIWYGYGGGLKWLERLSYINSVVYPWTSIPLLVYCSLPAICLLTGKFIVPEISNYASILFMALFGSIAVTGILEMQWGKVGIDDWWRNEQFWVIGGVSAHLFALFQGLLKVLAGVETNFTVTSKAADDGEFSELYIFKWTSLLIPPTTLLIINVIGVIVGISDAISNGYDSWGPLFGRLFFAFWVILHLYPFLKGLLGKQDRMPTIILVWSILLASILTLLWVRVNPFVAKGGPILEICGLDCL

SEQ ID NO: 6 - protein, 1084 aa, Arabidopsis thaliana
MNTGGRLIAGSHNRNEFVLINADENARIRSVQELSGQTCQICRDEIELTVDGEPFVACNECAFPVCRPCYEYERREGNQACPQCKTRFKRLKGSPRVEGDEEEDDIDDLDNEFEYGNNGIGFDQVSEGMSISRRNSGFPQSDLDSAPPGSQIPLLTYGDEDVEISSDRHALIVPPSLGGHGNRVHPVSLSDPTVAAHPRPMVPQKDLAVYGYGSVAWKDRMEEWKRKQNEKLQVVRHEGDPDFEDGDDADFPMMDEGRQPLSRKIPIKSSKINPYRMLIVLRLVILGLFFHYRILHPVKDAYALWLISVICEIWFAVSWVLDQFPKWYPIERETYLDRLSLRYEKEGKPSGLSPVDVFVSTVDPLKEPPLITANTVLSILAVDYPVDKVACYVSDDGAAMLTFEALSETAEFARKWVPFCKKYCIEPRAPEWYFCHKMDYLKNKVHPAFVRERRAMKRDYEEFKVKINALVATAQKVPEDGWTMQDGTPWPGNSVRDHPGMIQVFLGSDGVRDVENNELPRLVYVSREKRPGFDHHKKAGAMNSLIRVSGVLSNAPYLLNVDCDHYINNSKALREAMCFMMDPQSGKKICYVQFPQRFDGIDRHDRYSNRNVVFFDINMKGLDGLQGPIYVGTGCVFRRQALYGFDAPKKKKGPRKTCNCWPKWCLLCFGSRKNRKAKTVAADKKKKNREASKQIHALENIEEGRVTKGSNVEQSTEAMQMKLEKKFGQSPVFVASARMENGGMARNASPACLLKEAIQVISCGYEDKTEWGKEIGWIYGSVTEDILTGFKMHSHGWRSVYCTPKLAAFKGSAPINLSDRLHQVLRWALGSVEIFLSRHCPIWYGYGGGLKWLERLSYINSVVYPWTSLPLIVYCSLPAICLLTGKFIVPEISNYASILFMALFSSIAITGILEMQWGKVGIDDWWRNEQFWVIGGVSAHLFALFQGLLKVLAGVDTNFTVTSKAADDGEFSDLYLFKWTSLLIPPMTLLIINVIGVIVGVSDAISNGYDSWGPLFGRLFFALWVIIHLYPFLKGLLGKQDRMPTIIVVWSILLASILTLLWVRVNPFVAKGGPILEICGLDCL

SEQ ID NO: 7 - protein, 1026 aa, Arabidopsis thaliana
MEASAGLVAGSHNRNELVVIHNHEEPKPLKNLDGQFCEICGDQIGLTVEGDLFVACNECGFPACRPCYEYERREGTQNCPQCKTRYKRLRGSPRVEGDEDEEDIDDIEYEFNIEHEQDKHKHSAEAMLYGKMSYGRGPEDDENGRFPPVIAGGHSGEFPVGGGYGNGEHGLHKRVHPYPSSEAGSEGGWRERMDDWKLQHGNLGPEPDDDPEMGLIDEARQPLSRKVPIASSKINPYRMVIVARLVILAVFLRYRLLNPVHDALGLWLTSVICEIWFAVSWILDQFPKWFPIERETYLDRLSLRYEREGEPNMLAPVDVFVSTVDPLKEPPLVTSNTVLSILAMDYPVEKISCYVSDDGASMLTFESLSETAEFARKWVPFCKKFSIEPRAPEMYFTLKVDYLQDKVHPTFVKERRAMKREYEEFKVRINAQVAKASKVPLEGWIMQDGTPWPGNNTKDHPGMIQVFLGHSGGFDVEGHELPRLVYVSREKRPGFQHHKKAGAMNALVRVAGVLTNAPFMLNLDCDHYVNNSKAVREAMCFLMDPQIGKKVCYVQFPQRFDGIDTNDRYANRNTVFFDINMKGLDGIQGPVYVGTGCVFKRQALYGYEPPKGPKRPKMISCGCCPCFGRRRKNKKFSKNDMNGDVAALGGAEGDKEHLMSEMNFEKTFGQSSIFVTSTLMEEGGVPPSSSPAVLLKEAIHVISCGYEDKTEWGTELGWIYGSITEDILTGFKMHCRGWRSIYCMPKRPAFKGSAPINLSDRLNQVLRWALGSVEIFFSRHSPLWYGYKGGKLKWLERFAYANTTIYPFTSIPLLAYCILPAICLLTDKFIMPPISTFASLFFISLFMSIIVTGILELRWSGVSIEEWWRNEQFWVIGGISAHLFAVVQGLLKILAGIDTNFTVTSKATDDDDFGELYAFKWTTLLIPPTTVLIINIVGVVAGISDAINNGYQSWGPLFGKLFFSFWVIVHLYPFLKGLMGRQNRTPTIVVIWSVLLASIFSLLWVRIDPFVLKTKGPDTSKCGINC

SEQ ID NO: 8 - protein, 985 aa, Arabidopsis thaliana
MMESRSPICNTCGEEIGVKSNGEFFVACHECSFPICKACLEYEFKEGRRICLRCGNPYDENVFDDVETKTSKTQSIVPTQTNNTSQDSGIHARHISTVSTIDSELNDEYGNPIWKNRVESWKDKKDKKSKKKKKDPKATKAEQHEAQIPTQQHMEDTPPNTESGATDVLSVVIPIPRTKITSYRIVIIMRLIILALFFNYRITHPVDSAYGLWLTSVICEIWFAVSWVLDQFPKWSPINRETYIDRLSARFEREGEQSQLAAVDFFVSTVDPLKEPPLITANTVLSILALDYPVDKVSCYVSDDGAAMLSFESLVETADFARKWVPFCKKYSIEPRAPEFYFSLKIDYLRDKVQPSFVKERRAMKRDYEEFKIRMNALVAKAQKTPEEGWTMQDGTSWPGNNTRDHPGMIQVFLGYSGARDIEGNELPRLVYVSREKRPGYQHHKKAGAENALVRVSAVLTNAPFILNLDCDHYVNNSKAVREAMCFLMDPVVGQDVCFVQFPQRFDGIDKSDRYANRNIVFFDVNMRGLDGIQGPVYVGTGTVFRRQALYGYSPPSKPRILPQSSSSSCCCLTKKKQPQDPSEIYKDAKREELDAAIFNLGDLDNYDEYDRSMLISQTSFEKTFGLSTVFIESTLMENGGVPDSVNPSTLIKEAIHVISCGYEEKTEWGKEIGWIYGSITEDILTGFKMHCRGWRSIYCMPLRPAFKGSAPINLSDRLHQVLRWALGSVEIFLSRHCPLWYGCSGGRLKLLQRLAYINTIVYPFTSLPLVAYCTLPAICLLTGKFIIPTLSNLASMLFLGLFISIILTSVLELRWSGVSIEDLWRNEQFWVIGGVSAHLFAVFQGFLKMLAGLDTNFTVTSKTADDLEFGELYIVKWTTLLIPPTSLLIINLVGVVAGFSDALNKGYEAWGPLFGKVFFAFWVILHLYPFLKGLMGRQNRTPTIVILWSILLASVFSLVWVRINPFVSKTDTTSLSLNCLLIDC

SEQ ID NO: 9 - protein, 1088 aa, Arabidopsis thaliana
MNTGGRLIAGSHNRNEFVLINADDTARIRSAEELSGQTCKICRDEIELTDNGEPFIACNECAFPTCRPCYEYERREGNQACPQCGTRYKRIKGSPRVEGDEEDDDIDDLEHEFYGMDPEHVTEAALYYMRLNTGRGTDEVSHLYSASPGSEVPLLTYCDEDSDMYSDRHALIVPPSTGLGNRVHHVPFTDSFASIHTRPMVPQKDLTVYGYGSVAWKDRMEVWKKQQIEKLQVVKNERVNDGDGDGFIVDELDDPGLPMMDEGRQPLSRKLPIRSSRINPYRMLIFCRLAILGLFFHYRILHPVNDAFGLWLTSVICEIWFAVSWILDQFPKWYPIERETYLDRLSLRYEKEGKPSELAPVDVFVSTVDPLKEPPLITANTVLSILAVDYPVEKVACYVSDDGAAMLTFEALSYTAEFARKWVPFCKKFSIEPRAPEWYFSQKMDYLKHKVDPAFVMERRAMKRDYEEFKVKINALVSVSQKVPEDGWTMQDGTPWPGNNVRDHPGMIQVFLGHSGVCDMDGNELPRLVYVSREKRPGFDHHKKAGAMNSLIRVSAVLSNAPYLLNVDCDHYINNSKAIREAMCFMMDPQSGKKICYVQFPQRFDGIDRHDRYSNRNVVFFDINMKGLDGIQGPIYVGTGCVFRRQALYGFDAPKKKQPPGRTCNCWPKWCCLCCGMRKKKTGKVKDNQRKKPKETSKQIHALEHIEEGLQVTNAENNSETAQLKLEKKFGQSPVLVASTLLLNGGVPSNVNPASLLRESIQVISCGYEEKTEWGKEIGWIYGSVTEDILTGFKMHCHGWRSVYCMPKRAAFKGSAPINLSDRLHQVLRWALGSVEIFLSRHCPIWYGYGGGLKWLERFSYINSVVYPWTSLPLLVYCSLPAICLLTGKFIVPEISNYAGILFLLMFMSIAVTGILEMQWGKIGIDDWWRNEQFWVIGGVSSHLFALFQGLLKVLAGVSTNFTVTSKAADDGEFSELYIFKWTSLLIPPTTLLIINIVGVIVGVSDAINNGYDSWGPLFGRLFFALWVIVHLYPFLKGLLGKQDRVPTIILVWSILLASILTLLWVRVNPFVSKDGPVLEICGLDCLK

SEQ ID NO: 10 - protein, 1065 aa, Arabidopsis thaliana
MVAGSYRRYEFVRNRDDSDDGLKPLKDLNGQICQICGDDVGLTKTGNVFVACNECGFPLCQSCYEYERKDGSQCCPQCKARFRRHNGSPRVEVDEKEDDVNDIENEFDYTQGNNKARLPHRAEEFSSSSRHEESLPVSLLTHGHPVSGEIPTPDRNATLSPCIDPQLPGIYQLLLLPVRILDPSKDLNSYGLVNVDWKKRIQGWKLKQDKNMIHMTGKYHEGKGGEFEGTGSNGDELQMVDDARLPMSRVVHFPSARMTPYRIVIVLRLIILGVFLHYRTTHPVKDAYALWLTSVICEIWFAFSWLLDQFPKWYPINRETFLDRLALRYDRDGEPSQLAPVDVFVSTVDPMKEPPLVTANTVLSILAVDYPVDKVACYVSDDGSAMLTFEALSETAEFSKKWVPFCKKFNIEPRAPEFYFSQKIDYLKDKIQPSFVKERRAMKREYEEFKVRINILVAKAQKIPEDGWTMEDGTSWPGNNPRDHPGMIQVFLGHSGGLDTDGNELPRLIYVSREKRPGFQHHKKAGAMNALIRVSAVLTNGAYLLNVDCDHYFNNSKAIKEAMCFMMDPAIGKKCCYVQFPQRFDGIDLHDRYANRNTVFFDINLKGLDGIQGPVYVGTGCCFNRQALYGYDPVLTEEDLEPNIIVKSCFGSRKKGKSRKIPNYEDNRSIKRSDSNVPLFNMEDIDEDVEGYEDEMSLLVSQKRLEKRFGQSPVFIAATFMEQGGLPSTTNPLTLLKEAIHVISCGYEAKTDWGKEIGWIYGSVTEDILTGFKMHARGWISIYCVPSRPAFKGSAPINLSDRLNQVLRWALGSIEILLSRHCPIWYGYNGRLKLLERIAYINTIVYPITSIPLLAYCMLPAFCLITNTFIIPEISNLASLCFMLLFASIYASAILELKWSDVALEDWWRNEQFWVIGGTSAHLFAVFQGLLKVFAGIDTNFTVTSKASDEDGDFAELYVFKWTSLLIPPTTILLVNLVGIVAGVSYAINSGYQSWGPLMGKLLFAFWVVAHLYPFLKGLLGRQNRTPTIVIVWSALLASIFSLLWVRINPFVSTTGVMSNSFMGE

SEQ ID NO: 11 - protein, 1074 aa, Zea mays
MAANKGMVAGSHNRNEFVMIRHDGDAPVPAKPTKSANGQVCQICGDTVGVSATGDVFVACNECAFPVCRPCYEYERKEGNQCCPQCKTRYKRQKGSPRVHGDDEEEDVDDLDNEFNYKQGNGKGPEWQLQGDDADLSSSARHDPHHRIPRLTSGQQISGEIPDASPDRHSIRSPTSSYVDPSVPVPVRIVDPSKDLNSYGLNSVDWKERVESWRVKQDKNMLQVTNKYPEARGDMEGTGSNGEDMQMVDDARLPLSRIVPISSNQLNLYRIVIILRLIILCFFFQYRISHPVRNAYGLWLVSVICEVWFALSWLLDQFPKWYPINRETYLDRLALRYDREGEPSQLAPIDVFVSTVDPLKEPPLITANTVLSILAVDYPVDKVSCYVSDDGSAMLTFESLSETAEFARKWVPFCKKHNIEPRAPEFYFAQKIDYLKDKIQPSFVKERRAMKREYEEFKIRINALVAKAQKVPEEGWTMADGTAWPGNNPRDHPGMIQVFLGHSGGLDTDGNELPRLVYVSREKRPGFQHHKKAGAMNALIRVSAVLTNGAYLLNVDCDHYFNSSKALREAMCFMMDPALGRKTCYVQFPQRFDGIDLHDRYANRNIVFFDINMKGLDGIQGPVYVGTGCCFNRQALYGYDPVLTEADLEPNIVVKSCCGRRKRKNKSYMDSQSRIMKRTESSAPIFNMEDIEEGIEGYEDERSVLMSQRKLEKRFGQSPIFIASTFMTQGGIPPSTNPASLLKEAIHVISCGYEDKTEWGKEIGWIYGSVTEDILTGFKMHARGWQSIYCMPPRPCFKGSAPINLSDRLNQVLRWALGSVEILLSRHCPIWYGYNGRLKLLERLAYINTIVYPITSVPLIAYCVLPAICLLTNKFIIPEISNYAGMFFILLFASIFATGILELRWSGVGIEDWWRNEQFWVIGGTSAHLFAVFQGLLKVLAGIDTNFTVTSKASDEDGDFAELYVFKWTSLLIPPTTVLVINLVGMVAGISYAINSGYQSWGPLFGKLFFSIWVILHLYPFLKGLMGRQNRTPTIVIVWSILLASIFSLLWVKIDPFISPTQKAAALGQCGVNC

SEQ ID NO: 12 - protein, 983 aa, Zea mays
MMESAAAQSCAACGDDARAACRACSYALCRACLDEDAAEGRTTCARCGGDYAAINPARASEGTEAEEEVVENHHTAGGLRERVTMGSHLNDRQDEVSHARTMSSLSGIGSELNDESGKPIWKNRVESWKEKKNEKKASAKKTAAKAQPPPVEEQIMDEKDLTDAYEPLSRVIPISKNKLTPYRAVIIMRLIVLGLFFHYRITNPVNSAFGLWMTSVICEIWFGFSWILDQFPKWYPINRETYVDRLIARYGDGEESGLAPVDFFVSTVDPLKEPPLITANTVLSILAVDYPVEKISCYVSDDGSAMLTFESLAETAEYARKWVPFCKKYAIEPRAPEFYFSQKIDYLKDKIHPSFVKERRAMKRDYEEYKVRINALVAKAQKTPDEGWIMQDGTPWPGNNPRDHPGMIQVFLGETGARDFDGNELPRLVYVSREKRPGYQHHKKAGAMNALVRVSAVLTNAPYILNLDCDHYVNNSKAVREAMCFMMDPTVGRDVCYVQFPQRFDGIDRSDRYANRNVVFFDVNMKGLDGLQGPVYVGTGCCFNRQALYGYGPPSLPALPKSSICSWCCCCCPKKKVERSEREINRDSRREDLESAIFNLREIDNYDEYERSMLISQMSFEKSFGLSSVFIESTLMENGGVPESANPSTLIKEAIHVISCGYEEKTEWGKEIGWIYGSVTEDILTGFKMHCRGWRSIYCMPVRPAFKGSAPINLSDRLHQVLRWALGSVEIFFSRHCPLWYGYGGGRLKWLQRLSYINTIVYPFTSLPLVAYCCLPAICLLTGKFIIPTLSNAATIWFLGLFMSIIVTSVLELRWSGIGIEDWWRNEQFWVIGGVSAHLFAVFQGILKMIAGLDTNFTVTAKATDDTEFGELYLFKWTTVLIPPTSILVLNLVGVVAGFSAALNSGYESWGPLFGKVFFAMWVIMHLYPFLKGLMGRQNRTPTIVVLWSVLLASVFSLLWVKIDPFVGGTETVNTNNCNTIIC

SEQ ID NO: 13 - protein, 1074 aa, Zea mays
MEANRGMVAGSRGGVVTIRHDGDGAAAKQLKNVNEQICQICGDTLGLSATGDIFVACNECAFPVCRPCYEYERKEGNQCCPQCKTRYKRHKGSPRVRGDEEEDGVDDLDNEFNYTQGNVQGPQWQLRGQGEDVDISSSSRHEPHHRIPRLTTGQQMSGDIPDASPDRHSIRSPTPSYVDPSIPVPVRIVDPSKDLNSYGVGSVDWKERVESWKVRQDKNMIQVTHKYPAEGKGDIEGTGSNGEDLQMADDARLPLSRIVPISPNELNLYRIVIVLRLIILCFFFQYRITHPVEDAYGLWLVSVICEVWFALSWLLDQFPKWYPINRETYLDRLALRYDREGEPSQLAPIDVFVSTVDPLKEPPLITGNTVLSILAVDYPVDKVSCYVSDDGSAMLTFEALSETAEFARKWVPFCKKHNIEPRAPEFYFAQKIDYLKDKIQPSFVKERRAMKREYEEFKVRINALVAKAQKIPEEGWTMADGTPWPGNNPRDHPGMIQVFLGHSGGLDTDGNELPRLVYVSREKRPGFQHHKKAGAMNALIRVSAVLTNGAYLLNVDCDHYFNSSKALREAMCFMMDPALGRKTCYVQFPQRFDGIDLHDRYANRNIVFFDINMKGLDGIQGPVYVGTGCCFNRQALYGYDPVLTEADLEPNIIIKSCCGGRKKKDKSYIDSKNRDMKRTESSAPIFNMEDIEEGFEGYEDERSLLMSQKSLEKRFGQSPIFIASTFMTQGGIPPSTNPGSLLKEAIHVISCGYEDKTEWGKEIGWIYGSVTEDILTGFKMHARGWISIYCMPLRPCFKGSAPINLSDRLNQVLRWALGSVEILLSRHCPIWYGYNGRLKLLERLAYINTIVYPITSIPLVAYCVLPAICLLTNKFIIPAISNYAGAFFILLFASIFATGILELRWSGVGIEDWWRNEQFWVIGGTSAHLFAVFQGLLKVLAGIDTNFTVTSKATDDDGDFAELYVFKWTTLLIPPTTVLVINLVGIVAGVSYAINSGYQSWGPLFGKLFFAIWVILHLYPFLKGLMGKQNRTPTIVIVWSVLLASIFSLLWVKIDPFISPTQKALSRGQCGVNC

SEQ ID NO: 14 - protein, 1086 aa, Zea mays
MEASAGLVAGSHNRNELVVIRRDGDPGPKPPREQNGQVCQICGDDVGLAPGGDPFVACNECAFPVCRDCYEYERREGTQNCPQCKTRYKRLKGCQRVTGDEEEDGVDDLDNEFNWDGHDSQSVAESMLYGHMSYGRGGDPNGAPQAFQLNPNVPLLTNGQMVDDIPPEQHALVPSFMGGGGKRIHPLPYADPSLPVQPRSMDPSKDLAAYGYGSVAWKERMENWKQRQERMHQTGNDGGGDDGDDADLPLMDEARQQLSRKIPLPSSQINPYRMIIIIRLVVLGFFFHYRVMHPVNDAFALWLISVICEIWFAMSWILDQFPKWFPIERETYLDRLSLRFDKEGQPSQLAPIDFFVSTVDPLKEPPLVTTNTVLSILSVDYPVDKVSCYVSDDGAAMLTFEALSETSEFAKKWVPFCKRYNIEPRAPEWYFQQKIDYLKDKVAANFVRERRAMKREYEEFKVRINALVAKAQKVPEEGWTMQDGTPWPGNNVRDHPGMIQVFLGQSGGLDCEGNELPRLVYVSREKRPGYNHHKKAGAMNALVRVSAVLTNAPYLLNLDCDHYINNSKAIKEAMCFMMDPLLGKKVCYVQFPQRFDGIDRHDRYANRNVVFFDINMKGLDGIQGPIYVGTGCVFRRQALYGYDAPKTKKPPSRTCNCWPKWCFCCCCFGNRKQKKTTKPKTEKKKLLFFKKEENQSPAYALGEIDEAAPGAENEKAGIVNQQKLEKKFGQSSVFVTSTLLENGGTLKSASPASLLKEAIHVISCGYEDKTDWGKEIGWIYGSVTEDILTGFKMHCHGWRSIYCIPKRVAFKGSAPLNLSDRLHQVLRWALGSIEIFFSNHCPLWYGYGGGLKFLERFSYINSIVYPWTSIPLLAYCTLPAICLLTGKFITPELNNVASLWFMSLFICIFATSILEMRWSGVGIDDWWRNEQFWVIGGVSSHLFAVFQGLLKVIAGVDTSFTVTSKGGDDEEFSELYTFKWTTLLIPPTTLLLLNFIGVVAGVSNAINNGYESWGPLFGKLFFAFWVIVHLYPFLKGLVGRQNRTPTIVIVWSILLASIFSLLWVRIDPFLAKDDGPLLEECGLDCN

SEQ ID NO: 15 - protein, 1056 aa, Zea mays
MEASAGLVAGSHNRNELVLIRGHEDPKPLRALSGQVCEICGDEVGLTVDGDLFVACNECGFPVCRPCYEYERREGTQNCPQCKTRYKRLKGTPRVAGDDDEEDIDDLEHEFNIDDENQQRQLEGNMQNSQITEAMLHGRMSYGRGPDDGDGNNTPQIPPIITGSRSVPVSGEFPITNGYGHGEVSSSLHKRIHPYPVSEPGSAKWDEKKEVSWKERMDDWKSKQGILGGGADPEDMDADVALNDEARQPLSRKVSIASSKVNPYRMVIVVRLVVLAFFLRYRILHPVPDAIGLWLVSIICEIWFAISWILDQFPKWFPIDRETSLSGLDDAARCRYEREGEPSLLSAVDLFVSTVDPLKEPPLVTANTVLSILAVDYPVDKVSCYVSDDGASMLTFESLSETAEFARKWVPFCKKFGIEPRAPEFYFSLKVDYLKDKVQPTFVQERRAMKREYEEFKVRINALVAKAMKVPAEGWIMKDGTPWPGNNTRDHPGMIQVFLGHSGGHDTEGNELPRLVYVSREKRPGFQHHKKAGAMNALIRVSAVLTNAPFMLNLDCDHYINNSKAIREAMCFLMDPQVGRKVCYVQFPQRFDGIDVHDRYANRNTVFFDINMKGLDGIQGPVYVGTGCVFRRQALYGYNPPKGPKRPKMVTCDCCPCFGRKKRKHAKDGLPEGTADMGVDSDKEMLMSHMNFEKRFGQSAAFVTSTLMEEGGVPPSSSPAALLKEAIHVISCGYEDKTDWGLELGWIYGSITEDILTGFKMHCRGWRSVYCMPKRAAFKGSAPINLSDRLNQVLRWALGSVEIFFSRHSPLLYGYKNGNLKWLERFAYINTTIYPFTSLPLLAYCTLPAVCLLTGKFIMPSISTFASLFFIALFMSIFATGILEMRWSGVSIEEWWRNEQFWVIGGVSAHLFAVVQGLLKVLAGIDTNFTVTSKATGDEDDEFAELYAFKWTTLLIPPTTLLIINVIGVVAGISDAINNGYQSWGPLFGKLFFAFWVIVHLYPFLKGLMGRQNRTPTVVVIWSILLASIFSLLWVRIDPFIVRTKGPDVRQCGINC

SEQ ID NO: 16 - protein, 1077 aa, Zea mays
MEGDADGVKSGRRGGGQVCQICGDGVGTTAEGDVFAACDVCGFPVCRPCYEYERKDGTQACPQCKTKYKRHKGSPAIRGEEGDDTDADSDFNYPASGNEDQKQKIADRMRSWRMNAGGSGDVGRPKYDSGEIGLTKYDSGEIPRGYIPSVTNSQISGEIPGASPDHHMMSPTGNIGKRAPFPYVNHSPNPSREFSGSIGNVAWKERVDGWKMKQDKGTIPMTNGTSIAPSEGRGVGDIDASTDYNMEDALLNDETRQPLSRKVPLPSSRINPYRMVIVLRLIVLSIFLHYRITNPVRNAYPLWLLSVICEIWFALSWILDQFPKWFPINRETYLDRLALRYDREGEPSQLAAVDIFVSTVDPMKEPPLVTANTVLSILAVDYPVDKVSCYVSDDGAAMLTFDALAETSEFARKWVPFVKKYNIEPRAPEWYFSQKIDYLKDKVHPSFVKDRRAMKREYEEFKVRVNGLVAKAQKVPEEGWIMQDGTPWPGNNTRDHPGMIQVFLGHSGGLDTEGNELPRLVYVSREKRPGFQHHKKAGAMNALVRVSAVLTNGQYMLNLDCDHYINNSKALREAMCFLMDPNLGRSVCYVQFPQRFDGIDRNDRYANRNTVFFDINLRGLDGIQGPVYVGTGCVFNRTALYGYEPPIKQKKGGFLSSLCGGRKKASKSKKGSDKKKSQKHVDSSVPVFNLEDIEEGVEGAGFDDEKSLLMSQMSLEKRFGQSAAFVASTLMEYGGVPQSATPESLLKEAIHVISCGYEDKTEWGTEIGWIYGSVTEDILTGFKMHARGWRSIYCMPKRPAFKGSAPINLSDRLNQVLRWALGSVEILFSRHCPLWYGYGGRLKFLERFAYINTTIYPLTSIPLLIYCILPAICLLTGKFIIPEISNFASIWFISLFISIFATGILEMRWSGVGIDEWWRNEQFWVIGGISAHLFAVFQGLLKVLAGIDTNFTVTSKASDEDGDFAELYMFKWTTLLIPPTTILIINLVGVVAGISYAINSGYQSWGPLFGKLFFAFWVIVHLYPFLKGLMGRQNRTPTIVVVWAILLASIFSLLWVRIDPFTTRVTGPDTQTCGINC

SEQ ID NO: 17 - protein, 1094 aa, Zea mays
MEASAGLVAGSHNRNELVVIRRDRESGAAGGGAARRAEAPCQICGDEVGVGFDGEPFVACNECAFPVCRACYEYERREGSQACPQCRTRYKRLKGCPRVAGDEEEDGVDDLEGEFGLQDGAAHEDDPQYVAESMLRAQMSYGRGGDAHPGFSPVPNVPLLTNGQMVDDIPPEQHALVPSYMSGGGGGGKRIHPLPFADPNLPVQPRSMDPSKDLAAYGYGSVAWKERMEGWKQKQERLQHVRSEGGGDWDGDDADLPLMDEARQPLSRKVPISSSRINPYRMIIVIRLVVLGFFFHYRVMHPAKDAFALWLISVICEIWFAMSWILDQFPKWLPIERETYLDRLSLRFDKEGQPSQLAPIDFFVSTVDPTKEPPLVTANTVLSILSVDYPVEKVSCYVSDDGAAMLTFEALSETSEFAKKWVPFSKKFNIEPRAPEWYFQQKIDYLKDKVAASFVRERRAMKREYEEFKVRINALVAKAQKVPEEGWTMQDGSPWPGNNVRDHPGMIQVFLGQSGGRDVEGNELPRLVYVSREKRPGYNHHKKAGAMNALVRVSAVLSNAAYLLNLDCDHYINNSKAIKEAMCFMMDPLVGKKVCYVQFPQRFDGIDKNDRYANRNVVFFDINMKGLDGIQGPIYVGTGCVFRRQALYGYDAPKTKKPPSRTCNCWPKWCLSCCCSRNKNKKKTTKPKTEKKKRLFFKKAENPSPAYALGEIDEGAPGADIEKAGIVNQQKLEKKFGQSSVFVASTLLENGGTLKSASPASLLKEAIHVISCGYEDKTDWGKEIGWIYGSITEDILTGFKMHCHGWRSIYCIPKRPAFKGSAPLNLSDRLHQVLRWALGSVEIFFSKHCPLWYGYGGGLKFLERFSYINSIVYPWTSIPLLAYCTLPAICLLTGKFITPELTNVASIWFMALFICISVTGILEMRWSGVAIDDWWRNEQFWVIGGVSAHLFAVFQGLLKVFAGIDTSFTVTSKAGDDEEFSELYTFKWTTLLIPPTTLLLLNFIGVVAGISNAINNGYESWGPLFGKLFFAFWVIVHLYPFLKGLVGRQNRTPTIVIVWSILLASIFSLLWVRVDPFLAKSNGPLLEECGLDCN

SEQ ID NO: 18 - protein, 596 aa, Zea mays
MQDGTPWPGNNTRDHPGMIQVFLGHSGGLDTEGNELPRLVYVSREKRPGFQHHKKAGAMNALVRVSAVLTNGQYMLNLDCDHYINNSKALREAMCFLMDPNLGRSVCYVQFPQRFDGIDRNDRYANRNTVFFDINLRGLDGIQGPVYVGTGCVFNRTALYGYEPPIKQKKGGFLSSLCGGRKKGSKSKKGSDKKKSQKHVDSSVPVFNLEDIEEGVEGAGFDDEKSLLMSQMSLEKRFGQSAAFVASTLMEYGGVPQSATPESLLKEAIHVISCGYEDKTEWGTEIGWIYGSVTEDILTGFKMHARGWRSIYCMPKRPAFKGSAPINLSDRLNQVLRWALGSVEILFSRHCPLWYGYGGRLKFLERFAYINTTIYPLTSLPLLIYCILPAICLLTGKFIIPEISNFASIWFISLFISIFATGILEMRWSGVGIDEWWRNEQFWVIGGISAHLFAVFQGLLKVLAGIDTNFTVTSKASDEDGDFAELYMFKWTTLLIPPTTILIINLVGVVAGISYAINSGYQSWGPLFGKLFFAFWVIVHLYPFLKGLMGRQNRTPTIVVVWAILLASIFSLLWVRIDPFTTRVTGPDTRTCGINC

SEQ ID NO: 19 - protein, 1083 aa, Zea mays
MEASAGLVAGSHNRNELVVIRRDGDPGPKPPPREQNGQVCQICGDDVGLAPGGEPFVACNECAFPVCRDCYEYERREGTQNCPQCRTRYKRLKGCQRVTGDEEEDGVDDLDNEFNWNGHDSRSVADSMLYGRGGDPNGAPQPFQLNPNVPLLTNGQMVDDIPPEQHALVPSFMGGGGKRIHPLPYADPSLPVQPRSMDPSKDLAAYGYGSVAWKERVENWKQRQERMHQTRNDGGGDDGDDADLPLMDESRQPLSRKIPLPSSQINPYRMIIIIRLVVLGFFFHYRVMHPVNDAFALWLISVICEIWFAMSWILDQFPKWFPIERETYLDRLSLRFDKEGQPSQLAPIDFFVSTVDPLKEPPLVTANTVLSILSVDYPVDKVSCYVSDDGAAMLTFEALSETSEFAKKWAPFCKRYNIEPRAPEWYFQQKIDYLKDKVAANFVRERRAMKREYEEFKVRINALVAKAQKVPEEGWTMQDGTPWPGNNVRDHPGMIQVFLGQSGGLDCEGNELPRLVYVSREKRPGYNHHKKAGAMNALVRVSAVLSNAPYLLNLDCDHYINNSKAIKEAMCFMMDPLLGKKVCYVQFPQRFDGIDRHDRYANRNVVFFDINMKGLDGIQGPIYVGTGCVFRRQALYGYDAPKTKKPPSRTCNCWPKWCFCCCCCGNRKHKKKTTKPKTEKKKLLFFKKEENQSPAYALGEIDEAAPGAENEKAGIVNQQKLEKKFGQSSVFATSTLLENGGTLKSASPASLLKEAIHVISCGYEDKTDWGKEIGWIYGSVTEDILTGFKMHCHGWRSIYCIPKRPAFKGSAPLNLSDRLHQVLRWALGSIEIFFSNHCPLWYGYGGGLKFLERFSYINSIVYPWTSIPLLAYCTLPAICLLTGKFITPELNNVASLWFMSLFICIFATSILEMRWSGVGIDDWWRNEQFWVIGGVSSHLFAVFQGLLKVIAGVDTSFTVTSKGGDDDEFSELYTFKWTTLLIPPTTLLLLNFIGVVAGVSNAINNGYESWGPLFGKLFFAFWVIVHLYPFLKGLVGRQNRTPTIVIVWSILLASIFSLLWVRIDPFLAKDDGPLLEECGLDCN

SEQ ID NO: 20 - protein, 1079 aa, Zea mays
MEGDADGVKSGRRGGGQVCQICGDGVGTTAEGDVFTACDVCGFPVCRPCYEYERKDGTQACPQCKNKYKRHKGSPAIRGEEGDDTDADDASDFNYPASGNDDQKQKIADRMRSWRMNAGGSGDVGRPKYDSGEIGLTKYDSGEIPRGYIPSVTNSQISGEIPGASPDHHMMSPTGNIGRRAPFPYMNHSSNPSREFSGSVGNVAWKERVDGWKMKQDKGTIPMTNGTSIAPSEGRGVGDIDASTDYNMEDALLNDETRQPLSRKVPLPSSRINPYRMVIVLRLIVLSIFLHYRITNPVRNAYPLWLLSVICEIWFALSWILDQFPKWFPINRETYLDRLALRYDREGEPSQLAAVDIFVSTVDPMKEPPLVTANTVLSILAVDYPVDKVSCYVSDDGAAMLTFDALAETSEFARKWVPFVKKYNIEPRAPEWYFSQKIDYLKDKVHPSFVKDRRAMKREYEEFKIRVNGLVAKAQKVPEEGWIMQDGTPWPGNNTRDHPGMIQVFLGHSGGLDTEGNELPRLVYVSREKRPGFQHHKKAGAMNALVRVSAVLTNGQYMLNLDCDHYINNSKALREAMCFLMDPNLGRSVCYVQFPQRFDGIDRNDRYANRNTVFFDINLRGLDGIQGPVYVGTGCVFNRTALYGYEPPIKQKKGGFLSSLCGGRKKGSKSKKGSDKKKSQKHVDSSVPVFNLEDIEEGVEGAGFDDEKSLLMSQMSLEKRFGQSAAFVASTLMEYGGVPQSATPESLLKEAIHVISCGYEDKTEWGTEIGWIYGSVTEDILTGFKMHARGWRSIYCMPKRPAFKGSAPINLSDRLNQVLRWALGSVEILFSRHCPLWYGYGGRLKFLERFAYINTTIYPLTSLPLLIYCILPAICLLTGKFIIPEISNFASIWFISLFISIFATGILEMRWSGVGIDEWWRNEQFWVIGGISAHLFAVFQGLLKVLAGIDTNFTVTSKASDEDGDFAELYMFKWTTLLIPPTTILIINLVGVVAGISYAINSGYQSWGPLFGKLFFAFWVIVHLYPFLKGLMGRQNRTPTIVVVWAILLASIFSLLWVRIDPFTTRVTGPDTRTCGINC

SEQ ID NO: 21 - protein, 983 aa, Zea mays; identical to SEQ ID NO: 12

SEQ ID NO: 22 - protein, 790 aa, Zea mays
MEASAGLVAGSHNRNELVVIRRESGAGGGGGGGAARRAEAPCQICGDEVGVGFDGEPFVACNECAFPVCRACYEYERREGSQACPQCRTRYKRLKGCPRVAGDEEEDGVDDLEGEFGLQDGAGHEDDPQYVAESMLRAQMSYGRGGDAHPDFNPVPNVPLLTNGQMVDDIPPEQHALVPSYMGSGGGGKRIHPLPFADSNLPVQPRSMDPSKDLAAYGYGSVAWKERMEGWKQKQERLQHVRSEGGGDWDGDNADLPLMDEARQPLSRKVPISSSRINPYRMIIVIRLVVLGFFFHYRVMHPAKDAFALWLISVICEIWFAMSWILDQFPKWLPIERETYLDRLSLRFDKEGQPSQLAPIDFFVSTVDPTKEPPLVTANTVLSILSVDYPVEKVSCYVSDDGAAMLTFEALSETSEFAKKWVPFSKKFNIEPRAPEWYFQQKIDYLKDKVAASFVRERRAMKREYEEFKVRINALVAKAQKVPEEGWTMQDGSLWPGNNVRDHPGMIQVFLGQSGGRDVEGNELPRLVYVSREKRPGYNHHKKAGAMNALVRVSAVLSNAPYLLNLDCDHYINNSKAIKEAMCFMMDPLVGKKVCYVQFPQRFDGIDRHDRYANRNVVFFDINMKGLDGIQGPIYVGTGCVFRRQALYGYDAPKTKKPPSRTCNCWPKWCLSCCCSRNKNKKKTTKPKTEKKKRLFFKKAENPSPAYALGEIEEGAPGADIEKAGIVNQQKLEKKFGQSSVFVASTLLENGGTLKSASPASLLKEAIHVISCGYEDKTDWGKEVYIPYIT

SEQ ID NO: 23 - protein, 1075 aa, Zea mays
MAANKGMVAGSHNRNEFVMIRHDGDAPGSAKPTKSANGQVCQICGDSVGVSATGDVFVACNECAFPVCRPCYEYERKEGNQCCPQCKTRYKRQKGSPRVHGDEDEEDVDDLDNEFNYKQGNGKGPEWQLQGDDADLSSSARHEPHHRIPRLTSGQQISGEIPDASPDRHSIRSPTSSYVDPSVPVPVRIVDPSKDLNSYGLNSVDWKERVESWRVKQDKNMMQVTNKYPEARGGDMEGTGSNGEDMQMVDDARLPLSRIVPISSNQLNLYRVVIILRLIILCFFFQYRVSHPVRNAYGLWLVSVICEVWFALSWLLDQFPKWYPINRETYLDRLALRYDREGEPSQLAPIDVFVSTVDPLKEPPLITANTVLSILSVDYPVDKVSCYVSDDGSAMLTFESLSETAEFARKWVPFCKKHNIEPRAPEFYFAQKIDYLKDKIQPSFVKERRAMKREYEEFKVRINALVAKAQKVPEEGWTMADGTAWPGNNPRDHPGMIQVFLGHSGGLDTDGNELPRLVYVSREKRPGFQHHKKAGAMNALIRVSAVLTNGAYLLNVDCDHYFNSSKALREAMCFMMDPALGRKTCYVQFPQRFDGIDLHDRYANRNIVFFDINMKGLDGIQGPVYVGTGCCFNRQALYGYDPVLTEADLEPNIVIKSCCGRRKKKNKSYMDSQSRIMKRTESSAPIFNMEDIEEGIEGYEDERSVLMSQRKLEKRFGQSPIFIASTFMTQGGIPPSTNPASLLKEAIHVISCGYEDKTEWGKEIGWIYGSVTEDILTGFKMHARGWQSIYCMPPRPCFKGSAPINLSDRLNQVLRWALGSVEILLSRHCPIWYGYNGRLKLLERLAYINTIVYPITSIPLIAYCVLPAICLLTNKFIIPEISNYAGMFFILLFASIFATGILELRWSGVGIEDWWRNEQFWVIGGTSAHLFAVFQGLLKVLAGIDTNFTVTSKASDEDGDFAELYVFKWTSLLIPPTTVLVINLVGMVAGISYAINSGYQSWGPLFGKLFFSIWVILHLYPFLKGLMGRQNRTPTIVIVWSILLASIFSLLWVKIDPFISPTQKAAALGQCGVNC

SEQ ID NO: 24 - protein, 1076 aa, Zea mays
MDGGDATNSGKHVAGQVCQICGDGVGTAADGDLFTACDVCGFPVCRPCYEYERKDGTQACPQCKTKYKRHKGSPPVHGEENEDVDADDVSDYNYQASGNQDQKQKIAERMLTWRTNSRGSDIGLAKYDSGEIGHGKYDSGEIPRGYIPSLTHSQISGEIPGASPDHMMSPVGNIGRRGHQFPYVNHSPNPSREFSGSLGNVAWKERVDGWKMKDKGAIPMTNGTSIAPSEGRGVADIDASTDYNMEDALLNDETRQPLSRKVPIPSSRINPYRMVIVLRLAVLCIFLRYRITHPVNNAYPLWLLSVICEIWFALSWILDQFPKWSPINRETYLDRLALRYDREGEPSQLAPVDIFVSTVDPMKEPPLVTANTVLSILAVDYPVDKVSCYVSDDGAAMLTFDALSETSEFARKWVPFCKKYNIEPRAPEWYFAQKIDYLKDKVQTSFVKERRAMKREYEEFKVRINGLVANAQKVPEEGWIMQDGTPWPGNNTRDHPGMIQVFLGHSGGLDVEGNELPRLVYVSREKRPGFQHHKKAGAMNALVRVSAVLTNGQYMLNLDCDHYINNSKALREAMCFLMDPNLGRNVCYVQFPQRFDGIDRNDRYANRNTVFFDINLRGLDGIQGPVYVGTGCVFNRTALYGYEPPVKKKKPGFFSSLCGGRKKTSKSKKSSEKKKSHRHADSSVPVFNLEDIEEGIEGSQFDDEKSLIMSQMSLEKRFGQSSVFVASTLMEYGGVPQSATPESLLKEAIHVISCGYEDKTDWGTEIGWIYGSVTEDILTGFKMHARGWRSIYCMPKRPAFKGSAPINLSDRLNQVLRWALGSIEILFSRHCPIWYGYGGRLKFLERFAYINTTIYPLTSIPLLLYCILPAVCLLTGKFIIPKISNLESVWFISLFISIFATGILEMRWSGVGIDEWWRNEQFWVIGGISAHLFAVFQGLLKVLAGIDTSFTVTSKATDEEGDFAELYMFKWTTLLIPPTTILIINLVGVVAGISYAINSGYQSWGPLFGKLFFAFWVIVHLYPFLKGLMGKQNRTPTIVVVWAILLASIFSLMWVRIDPFTTRVTGPDIAKCGINC

SEQ ID NO: 25 - protein, 1089 aa, Zea mays
MEASAGLVAGSHNRNELVVIRRDGEPGPKPMDQRNGQVCQICGDDVGRNPDGEPFVACNECAFPICRDCYEYERREGTQNCPQCKTRFKRLKGCARVPGDEEEDGVDDLENEFNWSDKHDSQYLAESMLHAHMSYGRGADLDGVPQPFHPIPNVPLLTNGQMVDDIPPDQHALVPSFVGGGGKRIHPLPYADPNLPVQPRSMDPSKDLAAYGYGSVAWKERMESWKQKQERMHQTRNDGGGDDGDDADLPLMDEARQPLSRKIPLPSSQINPYRMIIIIRLVVLCFFFHYRVMHPVPDAFALWLISVICEIWFAMSWILDQFPKWFPIERETYLDRLSLRFDKEGHPSQLAPVDFFVSTVDPLKEPPLVTANTVLSILSVDYPVDKVSCYVSDDGAAMLTFEALSETSEFAKKWVPFCKRYSLEPRAPEWYFQQKIDYLKDKVAPNFVRERRAMKREYEEFKVRINALVAKAQKVPEEGWTMQDGTPWPGNNVRDHPGMIQVFLGQSGGHDVEGNELPRLVYVSREKRPGYNHHKKAGAMNALVRVSAVLTNAPYLLNLDCDHYINNSKAIKEAMCFMMDPLLGNKVCYVQFPQRFDGIDRHDRYANRNVVFFDINMKGLDGIQGPIYVGTGCVFRRQALYGYDAPKTKKPPSRTCNCWPKWCICCCCFGNRKTKKKTKTSKPKFEKIKKLFKKKENQAPAYALGEIDEAAPGAENEKASIVNQQKLEKKFGQSSVFVASTLLENGGTLKSASPASLLKEAIHVISCGYEDKTGWGKDIGWIYGSVTEDILTGFKMHCHGWRSIYCIPKRAAFKGSAPLNLSDRLHQVLRWALGSIEIFFSNHCPLWYGYGGGLKFLERFSYINSIVYPWTSIPLLAYCTLPAICLLTGKFITPELNNVASLWFMSLFICIFATSILEMRWSGVGIDDWWRNEQFWVIGGVSSHLFAVFQGLLKVIAGVDTSFTVTSKGGDDEEFSELYTFKWTTLLIPPTTLLLLNFIGVVAGISNAINNGYESWGPLFGKLFFAFWVIVHLYPFLKGLVGRQNRTPTIVIVWSILLASIFSLLWVRIDPFLAKDDGPLLEECGLDCN

SEQ ID NO: 26 - protein, 1033 aa, Glycine max
MEASAGLVAGSHNRNELVVIHGHEEHKPLKNLDGQVCEICGDDVGLTVDGDLFVACNECGFPACRPCYEYERREGRQVCPQCKTRYKRLKGSPRVEGDDDEEDVDDIEHEFNIEEQNKHNHSAEAMLHGKMSYGRGPEDDENAQFPAVIAGGRSRPVSGELPIASHYGDQMLASSLQNRSHPYLASDPRNGKLDEAKEDRMDDWKLQQGNLGHEPDEDPDAAMLDEARQPLSRKVPIASSKVNPYRMVIVARLVILAFFLRYRLMNPVHDALGLWLTSIICEIWFAFSWILDQFPKWFPIDRETYLDRLSIRYEREGEPNMLAPVDVFVSTVDPMKEPPLVTANTVLSILAMDYPVDKISCYISDDGASMCTFEALSETAEFARKWVPFCKKFSIEPRAPEMYFSEKVDYLKDKVQPTFVKDRRAMKREYEEFKVRINALVAKAQKVPQGGWIMQDGTPWPGNNTKDHPGMIQVFLGHSGGHDTEGNELPRLVYVSREKRPGFQHHKKAGAMNALIRVSAVLTNAPFMLNLDCDHYVNNSKAAREAMCFLMDPQTGKKVCYVQFPQRFDGIDRHDRYANRNTVFFDINMKGLDGIQGPAYVGTGCVFRRQALYGYNPPKGPKRPKMVSCDCCPCFGKRKKVKYEGNDANGEAASLRGMDDDKEVLMSQMNFEKKFGQSSIFVTSTLMEEGGVPPSASPASQLKEAIHVISCGYEDKTEWGIELGWIYGSITEDILTGFKMHCRGWRSIYCMPKRAAFKGTAPINLSDRLNQVLRWALGSIEIFFSRHCPLWYGYKEGKLKWLERFAYANTTVYPFTSIPLVAYCVLPAVCLLTDKFIMPPISTFAGLYFVALFSSIIATGLLELKWSGVSIEEWWRNEQFWVIGGVSAHLFAVIQGLLKVLAGIDTNFTVTSKAADDEEFGELYTFKWTTLLIPPTTILIINIVGVVAGISDAINNGYQSWGPLFGKLFFSFWVIVHLYPFLKGLMGRQNRTPTIVVIWSVLLASIFSLLWVRIDPFVLKTKGPDTKLCGINC

SEQ ID NO: 27 - protein, 1078 aa, Glycine max
MDTKGRLVAGSHNRNEFVLINADETARVAVTELSGQICQICGDELEVTVNGEPFVACNECAFPVCRPCYEYERREGNQVCPQCKTRYKRIKGSPRVEGDEEEDDSDDLESEFDIGSVFSARLNYGSQVNGSVIHAPSEFDAASVASEIPLLTYGQEDVGISADKHALILPPFTARGKRVHPMPFPDSSVPVQPRPMDPKKDIAVYGYGSVAWKERMEDWKKKQSEKLQVVRHEGGKDSDELDDPDLPKMDEGRQPLWRKLPISSSRINPYRIIIVLRIAILCLFFHYRILHPVNDAYALWLTSVICEIWFAVSWIFDQFPKWSPILRETYLDRLSLRYEKEGKPSLLADIDVFVSTVDPMKEPPLITANTVLSILAVDYPVDKVACYVSDDGAAMLTFEALSETSEFARKWVPFCKKFCIEPRAPEWYFAQKVDYLKDKVDATFIRERRAIKREYEEFKVRINALVALAQKVPEDGWTMQDGTPWPGNNVRDHPGMIQVFLGQNGVRDIEGNELPRLVYVSREKRPGYDHHKKAGAMNALVRVSAIITNAPYVLNVDCDHYINNSKALREAMCFMMDPTSGKKICYVQFPQRFDGIDRHDRYSNRNVVFFDINMKGLDGIQGPIYVGTGCVFRRQAFYGYDAPTSKKAPRKTCNCWPKWCCCLCCGSKKKKIKAKSSVKKKIKNKDDIKQMHALENIEEGIEGIDNEKSSLMSQSKFEKKFGQSSVFIASTLLEDGGVPKAASSATLLKEAIHVISCGYEDKTEWGKEVGWIYGSVTEDILTGFKMHCHGWRSVYCMPKRPAFKGSAPINLSDRLHQVLRWALGSVEIFFSRHCPIWYGYGGGLKSLERFSYINSVVYPLTSIPLIAYCALPAVCLLTGKFIVPEISNYASIIFMALFISIAATGILEMQWGGVGIHDWWRNEQFWVIGGASSHLFALFQGLLKVLAGVNTNFTVTSKAADDGEFADLYIFKWTSLLIPPLTLLIINIIGVIVGVSDAINNGYDSWGPLFGRLFFALWVIVHLYPFLKGVMGKQEGVPTIILVWAILLSSILTLLWVRINPFLAKSDVVLEICGLNCD

SEQ ID NO: 28 - protein, 1079 aa, Glycine max
MESEGEAGAKPVTALGAQVCQICGDGVGKTVDGEPFVACDVCAFPVCRPCYEYERKDGNQSCPQCKTRYKRHKGSPAILGDMEEDGAAAADASDFNYDSENQNQNQNQKQKISERMLSWQLTYPRGEEVGAPNYDKDVSHNHIPLLTSGQEVSGELSAASPERLSMASPAVGGGKRVHNIPYSSDINQSPNIRAGDPGLGNVAWKERVDGWKMKQEKNVVPMSTGQAASERGAGDIDASTDVLVDDSLLNDEARQPLSRKVSIPSSRINPYRMVIMLRLVILCIFLHYRITNPVPNAYPLWLVSVICEIWFAISWILDQFPKWLPVNRETYLDRLALRYDREGEPSQLAAVDIFVSTVDPLKEPPLVTANTVLSILAVDYPVDKVSCYVSDDGAAMLTFEALAETSEFARKWVPFSKKYSIEPRAPEWYFSQKIDYLKDKVHPSFVKDRRAMKREYEEFKVRINGLVSKAQKVPEEGWVMQDGTPWPGNNTRDHPGMIQVFLGQSGGLDTEGNELPRLVYVSREKRPGFQHHKKAGAMNALVRVSAVLTNGPFLLNLDCDHYINNSKALREAMCFMMDPNLGKHVCYVQFPQRFDGIDRNDRYANRNTVFFDINLRGLDGIQGPVYVGTGCVFNRTALYGYEPPLKPKHKKPGLLSSLCGGTRKKSSKSSKKGSDKKKSSKHVDPTVPIFNLEDIEEGVEGTGFDDEKSLLMSQMSLEKRFGQSAVFVASTLMENGGVPQSATPETLLKEAIHVISCGYEDKTDWGSEIGWIYGSVTEDILTGFKMHARGWRSIYCMPKRPAFKGSAPINLSDRLNQVLRWALGSVEILFSRHCPIWYGYGGRLKWLERFAYVNTTIYPVTAIPLLIYCILPAVCLLTNKFIIPQISNLASIWFISLFLSIFATGILEMRWSGVGIDEWWRNEQFWVIGGVSAHLFAVFQGLLKVLAGIDTNFTVTSKASDEDGDFAELYMFKWTTLLIPPTTLLIINLVGVVAGISYAINSGYQSWGPLFGKLFFAFWVIIHLYPFLKGLMGRQNRTPTIVVVWSVLLASIFSLLWVRIDPFTTRVTGPDVEECGINC

SEQ ID NO: 29 - protein, 973 aa, Glycine max
MEACTGLFAGTPNSNELVVIQGHDEPKPVKNLDGQLCEICGDSVGLTVDGDLFVACEECGFPVCRPCYEYERREGTQVCPQCHTRYKRIKGSPRVLGDEDEDDVDDIEHEFKHEEMLQGNMTHGDSEGNSKSKPVGLAKVNGELPVSSHSVGEPGAKLDDKEKVDEWMLHQGNLWPETDASVDPEKAMKEPLSRKVPIPSGRLSPYRMMVVARLLLLLLFFQYRIFHPVPDAIGLWFISVTCEIWLALSWMIDQLPKWFPIDRETYLDRLSIRFEPENKPNMLSPIDIIVTTVDPIKEPPLVTANTVLSILALDYPADKISCYVSDDGASMLTFEALQETAEFSRKWVPFCKTFSVEPRAPEKYFSEKIDFLKDKLQSTYVKERRTMKREYEEFKVRINALVAKSMRVPPEGWTMKDETPWPGNNSKDHPSMIQVLLPHNVGNELPCLVYTSREKRPAFQHHNKAGAINAMLRVSAVLSNAPFVLNLDCNHYVNNSKVVREAMCFFMDIQLGNGIAFVQFPLRFDSLDRNDRYANKNTVLFDINLRCLDGIQGPAYIGSACIFRRKALTGFDSPKTSKRPSMVQVHSKQDENGEEASITGEDKELLKSEMNDENKFGKSILFMNSALAEEGGVDPSSSQEALLKEAIHVMSSRYEDRTLWGYEVGLSYGSIAADTLTSLKMHCGGWRSVYCMPKRDPFRGTAPINLTDRLNQVLRWAVGSLQILFSSHCPLLYGGRLKGLQRIAYINSTVYPFSSIPLLIYCIIPAICLLTDKFITPSVGTFASLIFIALFISIFASAILELRWSGVSLEEWWRSQQFWVIGSVSANLFALLQGIMRALPLGRVNTNFSIVSKAPDDVEFRELYAIRWTALLIPPTTIIIINLIGIVAGFTDAINSGEHSWGALLGKLFFSLWVVIHLYPFLKGLMGRQNRTPTLIVIWSVLLASIFSLVWVRVDPFVLKTKGPDVKQCGISC

SEQ ID NO: 30 - protein, 975 aa, Glycine max
MMESGAHFCNSCGEQIGLDANGEVFVACHECYFPICKACFEYEINEGRKVCLRCATPYADRAKDNNDTKVYENQSTTAAQINVSQDVGLHARHVSTVSTVDSELNDESGNPIWKNRVESWKEKDKKKKKKKSAPKAENEAPIPPEQQMEEMQSSEAAAAEPLSMVIPISKTRLAPYRTVIIVRLIILGLFFHYRVTNPVDSAFGLWLTSIICEIWFAFSWVLDQFPKWSPVNREAFIDRLSLRYERPGEPSQLAAVDFFVSTVDPLKEPPLITANTVLSILAVDYPVDKVSCYVSDDGAAMLSFESLVETADFARKWVPFCKKFSIEPRAPEFYFSQKIDYLKDKVQPSFVKERRAMKREYEEFKVRVNALVAKAQKTPDEGWTMQDGTSWPGNNSRDHPGMIQVFLGHSGAHDIEGNELPRLVYVSREKRPGYQHHKKAGAENALVRVSAVLTNAPFILNLDCDHYVNNSKAVREAMCFLMDPVVGRDLCYVQFPQRFDGIDRSDRYANRNTVFFDVNMKGLDGIQGPMYVGTGCVFNRQALYGYSPPSMPKLPKSSSCCCCPSKKQTKDVSELYRDAKREELDAAIFNLREIDNYDEYERSMLISQMSFEKTFGLSTVFIESTLMENGGLPESADPSMLIKEAIHVISCGYEEKTAWGKEIGWIYGSVTEDILTGFKMQCRGWRSVYCMPLRPAFKGSAPINLSDRLHQVLRWALGSVEIFFSRHCPLWYGFAGGRLKWLQRLAYINTIVYPFTSLPLVAYCTLPAICLLTGKFIIPTLSNLASALFLGLFLSIIVTSVLELRWSGVTIEALWRNEQFWVIGGVSAHLFAVFQGFLKMLAGVDTNFTVTAKAADDTEFGDLYIIKWTTLLIPPTTLIIINMVGVVAGFSDALNGGYESWGPLFGKVFFAFWVIFHLYPFLKGLMGRQNRTPTIVILWSVLLASVFSLVWVKINPFISRPDSASISQTCISIDC

SEQ ID NO: 31 - protein, 1039 aa, Glycine max
MEASAGLVAGSHNRNELVVIHGHEEPKALKNLDGQVCEICGDGVGLTVDGDLFVACNECGFPVCRPCYEYERREGSHLCPQCKTRYKRLKGSPRVEGDDDEEDVDDIEHEFNIDEQKNKHGQVAEAMLHGRMSYGRGPEDDDNSQFPTPVIAGGRSRPVSGEFPISSNAYGDQMLSSSLHKRVHPYPVSEPGSARWDEKKEDGWKDRMDDWKLQQGNLGPEPDEDPDAAMLDEARQPLSRKVPIASSKINPYRMVIVARLVILAFFLRYRLMNPVHDALGLWLTSIICEIWFAFSWILDQFPKWFPIDRETYLDRLSIRYEREGEPNMLAPVDVFVSTVDPMKEPPLVTANTVLSILAMDYPVDKISCYISDDGASMCTFESLSETAEFARKWVPFCKKFSIEPRAPEMYFSEKIDYLKDKVQPTFVKERRAMKREYEEFKVRINALVAKAQKVPQGGWIMQDGTPWPGNNTKDHPGMIQVFLGSSGGLDTEGNQLPRLVYVSREKRPGFQHHKKAGAMNALVRVSAVLTNAPFMLNLDCDHYVNNSKAAREAMCFLMDPQTGKKVCYVQFPQRFDGIDTHDRYANRNTVFFDINMKGLDGIQGPVYVGTGCVFRRQALYGYNPPKGPKRPKMVSCDCCPCFGSRKKYKEKNDANGEAASLKGMDDDKEVLMSQMNFEKKFGQSSIFVTSTLMEEGGVPPSSSPAALLKEAIHVISCGYEDKTEWGLELGWIYGSITEDILTGFKMHCRGWRSIYCMPKRAAFKGTAPINLSDRLNQVLRWALGSIEIFFSHHCPLWYGFKEKKLKWLERFAYANTTVYPFTSIPLVAYCILPAVCLLTDKFIMPPISTFAGLYFVALFSSIIATGILELKWSGVSIEEWWRNEQFWVIGGVSAHLFAVIQGLLKVLAGIDTNFTVTSKATDDEEFGELYTFKWTTLLIPPTTILIINIVGVVAGISDAINNGYQSWGPLFGKLFFSFWVIVHLYPFLKGLMGRQNRTPTIVVIWSVLLASIFSLLWVRIDPFVLKTKGPDTKLCGINC

SEQ ID NO: 32 - protein, 967 aa, Glycine max
METNLGLVAGSHNSNEFIIIRQDGDFAQRELQPLLHGKICQLCGDDIGVNEDGDLFVACNECAFPVCKSCYEYERREGNQVCPQCKTRFKRLKGCARVEGDEEEDIDDDLENEFDFDDGQSKLHDMKTSMSHEEQGEETSQEHNALVTSSSTILGKEIVALQARPMDPSKDLAAYGYGSIAWKEKMKIWKQRQMKISDMKKENDNEDPDNTVEDDDTEFLITYLDRLSLRYEKEGKPSQLSPIDIFVISMDPLKEPPLVTANTVLSILAIDYPAEKVSCYVSDDGAAMLTFEALSETSEFAKKWVPFCKKFNIEPRAPERYFAEKINFLDDKVQPSFVKERRAMKREYEEFRVRINTLVAKSRKVPEEGWTMQDGTPWPGNNVRDHPGMIQVFLGETGGCDMDGKELPRLVYVSREKRPKFNHQKKAGALNALVRVSAVLSNAPFVLNLDYNHCINNSKVVREAMCFMMDPLLGKGASYVQFSQRFDGIASDEQYANQTNGFIDINMKGLDGIQGPTYIGTGCVFRRQALYGFDSPRKKKPPTKTCNCWPKWCCFGCCFMGKRKKKKLKKPKFEITETSHRKVHSESSIVEGKEDETSAHLSNPKFVKKYGQSPIFIASIQLVDGETLKHGNLASQLTEAIHVISCGYEEKTEWGKEVGWIYGSVTEDILTGFKMHCHGWRSIYCTPRRPGFKVSTPRNLSNGLQQVFQWALGSIEIFMSKHCPLWYGYGGGLKWLQRISYINAIVYPWTSIPLVVYCTLPAICLLTGKFIIPELSNAAGMWFVSLFFCIFTTSVLEMRWSGVTVDEWWRNEQFWVIGGVSAHFLAVFLGMFKVLAGVKTNFIVASKVDDKEHSNMFALKWTTLLIIPTTLLVLNIIAVVAGVSYAINNGFESWGPLLGKLLFSLWVILHLYPFLKGMIGRHNRTPTIVLVWAILLASFFSVLWVKIDPFLPKSDGPILEECGLDCN

SEQ ID NO: 33 - protein, 990 aa, Glycine max
MRTPTSLTHAYLHWFHSPLTMEASTGLFAGTPNSNELVVIQGHDEPKPVKNLDGQLCEICGDSVGLTVDGDLFVACEECGFPVCRPCYEYERREGTQVCPQCHTRYKRTKGSPRVLGDEDEDDVDDIEHEFKHEEMLQGNKTHRDSDVGLAKVNGELPISSNSVEEPGAKLDDKEKVDEWMLHQGNLWPETDASDDPVKAMKEPLSRKVPIPSGRLSPYRMMVVARLLLLLLFFQYRIFHPVPDAIGLWFISVTCEIWLALSWMIDQLPKWFPIDRETYLDRLSIRFEPENKPNMLSPIDIIVTTVDPIKEPPLVTANTVLSILALDYPADKISCYVSDDGASMLTFEVLQETAEFSRKWVPFCKKFSVEPRAPEKYLTEKIDFLKDKLQSTYVKERRTMKREYEEFKVRINALVAKSMRVPPEGWTMKDETPWPGNNSKDHPSMIQVLLPHNVGNELPCLVYTSREKRPAFQHHNKAGAINAMLRVSAVLNNAPFVLNLDCNHYVNNSKVVREAMCFFMDIQLGNGIGFVQFPLRFDSLDRNDRYANKNTVLFDINLRCLDGIQGPAYVGSACIFRRKALTGFDSPKASKRPSMVQVHSKQDENGEEASKTAAATDEDKELLKSENKFGMSTIFMNSSWTEEGGVDPSSSQEALLKEAIHVMNSRYEDRTLWGYEVGLSYGSIATDTLTSMKMHCGGWRSVYCMPKRDPFRGTAPINLTERLNQVLRWAVGSLQILFSSHCPLVYGLNGGRLKGLQRIAYINSTVYPFTSIPLLIYCTIPAICLLTDKFITPSVGTFASLIFIALFISIFASAILELRWSRVSLEEWWRSQQFWVIGSVSANLFAVLQGIMGALPLSSRVNKNFSIVSKAPDEVEFRELYAIRWTALLIPPTTIIIINLIGIVAGFTDAINSGEHSWGALLGKLFFSLWVIVHLYPFLKGLMGRQNRTPTLIVIWSVLLASIFSLVWVRVDPFVLKTKGPDVKQCGISC

SEQ ID NO: 34 - protein, 1084 aa, Glycine max
MEASAGMVAGSHKRNELVRIRHDSSDSGSKPLKSLNGQICQICGDTVGLTATGDVFVACNECAFPVCRPCYEYERKDGNQSCPQCKTRYKRHRGSPRVEGDEDEDDSDDIENEFNYAQGKAKARRQWEDDADLSSSSRRESQQPIPLLTNGQTMSGEIPCATPDTQSVRTTSGPLGPSEKVHSLPYVDPRQPVPVRIVDPSKDLNSYGLGNVDWKERVEGWKLKQEKNMVQMTGRYTEGKGGDVEGTGSNGEELQMVDDARQPMSRVVPIPSSQLTPYRVVIILRLIILGFFLQYRVTHPVKDAYPLWLTSVICEIWFALSWLLDQFPKWSPINRETYLERLALRYDREGEPSQLDPVDVFVSTVDPLKEPPLVTANTVLSILSVDYPVDKVSCYVSDDGSAMLTFEALSETAEFAKKWVPFCKKHNIEPRAPEFYFAQKIDYLKDKIQPSFVKERRAMKREYEEFKVRINALVAKAQKMPEEGWTMQDGTAWPGNNPRDHPGMIQVFLGHSGGLDTDGNELPRLVYVSREKRPGFQHHKKAGAMNALIRVSAVLTNGAYLLNVDCDHYFNNSKALKEAMCFMMDPVIGKKTCYVQFPQRFDGIDLHDRYANRNIVFFDINMKGQDGVQGPVYVGTGCCFNRQALYGYDPVLTEEDLEPNIIVKSCWGSRKKGKGGNKKYSDKKKAMGRTESTVPIFNMEDIEEGVEGYDDERTLLMSQKSLEKRFGQSPVFIAATFMEQGGIPPSTNPATLLKEAIHVISCGYEDKTEWGKEIGWIYGSVTEDILTGFKMHARGWISIYCMPPRPAFKGSAPINLSDRLNQVLRWALGSIEIFLSRHCPLWYGYNGKLKPLMRLAYINTIVYPFTSIPLIAYCTLPAFCLLTNKFIIPEISNFASMWFILLFVSIFTTSILELRWSGVSIEDWWRNEQFWVIGGTSAHLFAVFQGLLKVLAGIDTNFTVTSKASDEDGDFAELYVFKWTSLLIPPTTVLIVNLVGIVAGVSYAINSGYQSWGPLFGKLFFAIWVIAHLYPFLKGLLGRQNRTPTIVIVWSVLLASIFSLLWVRIDPFTSDSNKLTNGQCGINC

SEQ ID NO: 35 - protein, 1084 aa, Glycine max
MEASAGMVAGSHKRNELVRIRHDSSDSGSKPMKNLNGQICQICGDTVGLTATGDVFVACNECAFPVCRPCYEYERKDGNQSCPQCKTRYKRHRGSPRVEGDEDEDDSDDIENEFNYAQGKAKARRQWEDDPDLSSSSRRESQQPIPLLTNGQTMSGEIPCATPDTQSVRTTSGPLGPSEKVHSLPYVDPRQPVPVRIVDPSKDLNSYGLGNVDWKERVEGWKLKQEKNMVQMTGRYAEGKGGDVEGTGSNGEELQMVDDARQPMSRVVPIPSSQLTPYRVVIILRLIILGFFLQYRVTHPVKDAYPLWLTSVICEIWFALSWLLDQFPKWSPINRETYLERLALRYDREGEPSQLDPVDVFVSTVDPLKEPPLVTANTVLSILSVDYPVDKVSCYVSDDGSAMLTFEALSETAEFAKKWVPFCKKHNIEPRAPEFYFAQKIDYLKDKIQPSFVKERRAMKREYEEFKVRINALVAKAQKMPEEGWTMQDGTPWPGNNPRDHPGMIQVFLGHSGGLDTDGNELPRLVYVSREKRPGFQHHKKAGAMNALIRVSAVLTNGAYLLNVDCDHYFNNSKALKEAMCFMMDPVLGKKTCYVQFPQRFDGIDLHDRYANRNIVFFDINMKGQDGVQGPVYVGTGCCFNRQALYGYDPVLTEEDLEPNIIVKSCCGSRKKGKGGNKKYSDKKKAMGRTESTVPIFNMEDIEEGVEGYDDERTLLMSQKSLEKRFGQSPVFIAATFMEQGGIPPSTNPATLLKEAIHVISCGYEDKTEWGKEIGWIYGSVTEDILTGFKMHARGWISIYCMPPRPAFKGSAPINLSDRLNQVLRWALGSIEIFLSRHCPLWYGYNGKLKPLMRLAYINTIVYPFTSIPLIAYCTLPAFCLLTNKFIIPEISNFASMWFILLFVSIFTTSILELRWSGVSIEDWWRNEQFWVIGGTSAHLFAVFQGLLKVLAGIDTNFTVTSKASDEDGDFAELYVFKWTSLLIPPTTVLIVNLVGIVAGVSYAINSGYQSWGPLFGKLFFAIWVIAHLYPFLKGLLGRQNRTPTIVIVWSVLLASIFSLLWVRIDPFTSDSNKLTNGQCGINC

SEQ ID NO: 36 - protein, 976 aa, Glycine max
MMESGAHFCNSCGEQIGLDANGELFVACHECYFPICKACFEYEINEGRKVCLRCATPYSDRVKDNDGTKVYENQSTTAAQINVSQDVGLHARHVSTVSTVDSELNDESGNPIWKNRVESWKEKDKKKKKKKKSVPKAENEAPIPPEQQMEEIQSSEASAAEPLSMVIPISKTRLAPYRTVIIVRLIILGLFFHYRVTNPVDSAFGLWLTSIICEIWFAFSWVLDQFPKWSPVNREAFVDRLSARYERPGEPSQLAAVDFFVSTVDPLKEPPLITANTVLSILAVDYPVDKVSCYVSDDGAAMLTFESLVETADFARMWVPFCKKFSIEPRAPEFYFSQKIDYLKDKVQPSFVKERRAMKREYEEFKVRVNALVAKAQKTPDEGWTMQDGTSWPGNNSRDHPGMIQVFLGHSGAHDVEGNELPRLVYVSREKRPGYQHHKKAGAENALVRVSAVLTNAPFILNLDCDHYVNNSKAVREAMCFLMDPVVGRDLCYVQFPQRFDGIDRSDRYANRNTVFFDVNMKGLDGIQGPMYVGTGCVFNRQALYGYSPPSMPKLPKSSSCCCCPSKKQTKDVSELYRDAKREELDAAIFNLREIDNYDEYERSMLISQMSFEKTFGLSTVFIESTLMENGGLPESSDPSMLIKEAIHVISCGYEEKTAWGKEIGWIYGSVTEDILTGFKMQCRGWRSVYCMPLRPAFKGSAPINLSDRLHQVLRWALGSVEIFFSRHCPLWYGFAGGRLKWLQRLAYINTIVYPFTSLPLVAYCTLPAICLLTGKFIIPTLSNLASALFLGLFLSIIVTSVLELRWSGVTIEALWRNEQFWVIGGVSAHLFAVFQGFLKMLAGVDTNFTVTAKAADDTEFGELYIIKWTTLLIPPTTLIIINIVGVVAGFSDALNGGYESWGPLFGKVFFAFWVIFHLYPFLKGLMGRQNRTPTIVILWSVLLASVFSLVWVKINPFISRPDSASISQTCISIDC

SEQ ID NO: 37 - protein, 1039 aa, Glycine max
MEASAGLVAGSHNRNELVVIHGHEEPKALKNLDGQVCEICGDGVGLTVDGDLFVACNECGFPVCRPCYEYERREGSQLCPQCKTRYKRLKGSPRVEGDDDEEDVDDIEHEFNIDEQTNKHGQVAEAMLHGKMSYGRGPEDDENSQFPTPVIAGGRSRPVSGEFPLSSNVYGDQMLSSSLHKRVHPYPVSEPGSARWDEKKEDGWKDRMDDWKLQQGNLGPEPDEDPDAAMLDEARQPLSRKVPIASSKINPYRMVIVARLVILAFFLRYRLMNPVHDALGLWLTSIICEIWFAFSWILDQFPKWFPIDRETYLDRLSIRYEREGEPNMLAPVDVFVSTVDPMKEPPLVTANTVLSILAMDYPVDKISCYISDDGASMCTFESLSETAEFARKWVPFCKKFSIEPRAPEMYFSEKIDYLKDKVQPTFVKERRAMKREYEEFKVRINALVAKAQKVPQGGWIMQDGTPWPGNNTKDHPGMIQVFLGSSGGLDTEGNQLPRLVYVSREKRPGFQHHKKAGAMNALVRVSAVLTNAPFMLNLDCDHYVNNSKAAREAMCFLMDPQTGKKVCYVQFPQRFDGIDTHDRYANRNTVFFDINMKGLDGIQGPVYVGTGCVFRRQALYGYNPPKGPKRPKMVSCDCCPCFGSRKKYKEKSNANGEAARLKGMDDDKEVLMSQMNFDKKFGQSSIFVTSTLMEEGGVPPSSSPAALLKEAIHVISCGYEDKTEWGLELGWIYGSITEDILTGFKMHCRGWRSIYCMPKRAAFKGTAPINLSDRLNQVLRWALGSIEIFFSHHCPLWYGFKEKKLKWLERFAYANTTVYPFTSIPLVAYCILPAVCLLTDKFIMPPISTFAGLYFVALFSSIIATGILELKWSGVSIEEWWRNEQFWVIGGVSAHLFAVIQGLLKVLAGIDTNFTVTSKATDDEEFGELYTFKWTTLLIPPTTILIINIVGVVAGISDAINNGYQSWGPLFGKLFFSFWVIVHLYPFLKGLMGRQNRTPTIVVIWSVLLASIFSLLWVRIDPFVLKNKGPDTKLCGINC

SEQ ID NO: 38 - protein, 1097 aa, Glycine max
MHTGGRLVAGSHNRNEFVLINADENGRIKSVRELSGQICQICGDEIEITVDGEPFVACNECAFPVCRPCYEYERREGNQACPQCKTRYKRIKGSPRVEGDEEEDDTDDLDNEFDYGDIDALGPQPMSESLYSGRPNTGRGANNGSGLATNLEHGSSALNSDIPLLTYGEEDPEISSDRHALIVPPYVNHGSRVHPMPYTDPSIPLQPRPMVPKKDIAVYGYGSVAWKDRMEDWKKRQSDKLQVVKHEGSNDGNFGDDFEDPDLPMMDEGRQPLSRKLPIPSSKINPYRMIIILRLVVLGLFFHYRILHPVNDAYGLWLTSVICEIWFAVSWIMDQFPKWYPIQRETYLDRLSLRYEKEGKPSELSSVDVFVSTVDPMKEPPLITANTVLSILAVDYPVDKVACYVSDDGAAMLTFEALSETSEFARRWVPFCKKYNIEPRAPEWYFGQKMDYLKNKVHPAFVRERRAMKRDYEEFKVRINSLVATAQKVPEDGWTMQDGTPWPGNNVRDHPGMIQVFLGQDGVRDVEGNELPRLVYVSREKRPGFDHHKKAGAMNALVRASAIITNAPYLLNVDCDHYINNSKALREAMCFMMDPQLGKKVCYVQFPQRFDGIDRHDRYSNRNVVFFDINMKGLDGIQGPIYVGTGCVFRRYALYGYDAPAKKKPPSKTCNCWPKWCCLCCGSRKKKNANSKKEKKRKVKHSEASKQIHALENIEAGNEGTNNEKTSNLTQTKLEKRFGQSPVFVASTLLDDGGVPHGVSPASLLKEAIQVISCGYEDKTEWGKEVGWIYGSVTEDILTGFKMHCHGWRSVYCIPKRPAFKGSAPINLSDRLHQVLRWALGSVEIFFSRHCPIWYGYGGGLKLLERFSYINSVVYPWTSLPLLVYCTLPAICLLTGKFIVPEISNYASLVFMALFISIAATGILEMQWGGVSIDDWWRNEQFWVIGGVSSHLFALFQGLLKVLAGVNTNFTVTSKAADDGEFSELYIFKWTSLLIPPMTLLIMNIVGVVVGISDAINNGYDSWGPLFGRLFFALWVILHLYPFLKGLLGKQDRMPTIILVWSILLASILTLMWVRINPFVSRDGPVLEICGLNCDES

SEQ ID NO: 39 - protein, 989 aa, Glycine max
MVQSSVPLCNTCGEQVGLNDNGEVFVACHECNFPICKDCFEHEINEDHRVCMRCGTPYEERTKEEDDFHEIKVHENEDDDFHEIKVHENQSATPSEISNSQDVGLHARHVSTVSAVDSEVNEESGKSIWKNRVESWKGKDKKNKKKKSAPKEEKEASIPPEQQMEETRPAEAAAAPLSVVIPMSKSKIAPYRTVIIMRLIILGLFFHYRVTNPVESAFPLWLTSIICEIWFAFSWVLDQFPKWSPINRQTFIDNLSARFEREGEPNELAAVDFFVSTVDPLKEPPLITANTVLSILAVDYPVDKVSCYVSDDGAAMLTFESLVETADFARKWVPFCKKFSIEPRAPEFYFSQKIDYLKDKVQPSFVKERRAMKRDYEEYKVRVNAMVAKAQKTPEEGWTMQDGTPWPGNNSRDHPGMIQVFLGHTGARDIEGNELPRLVYVSREKRPGYQHHKKAGAENALVRVSAVLTNAPFILNLDCDHYVNNSKAVREAMCFLMDPEVGRDVCYVQFPQRFDGIDRSDRYANRNTVFFDVNMKGLDGIQGPVYVGTGCVFNRQALYGYSPPSMPSVPRSSCCCFPSKKSTNDVSDFQRNAKREELEAAIFNLKELDNYDEHERSMLISQMSFEKTFGLSTVFIESTLMENGGVPESADPSMLIKEAIHVISCGYEEKTLWGKEIGWIYGSVTEDILSGFKMQCRGWKSIYCMPLRPAFKGSAPINLSDRLHQVLRWALGSIEIFLSRHCPLWYGFSGGRLKWLQRMAYINTIVYPFTSLPLIAYCSLPAICLLTGKFIIPTLSNVASVLFLGLFLSIIITSVLELRWSGVSIEDLWRNEQFWVIGGVSAHLFAVFQGLLKMLAGVDTNFTVTAKAAEDSEFGELYLVKWTTLLIPPTTLIVVNMVGVVAGFSDALNGGYESWGPLFGKVFFAFWVIFHLYPFLKGLMGRQNRTPTIVILWSVLLASVFSLIWVKINPFVNTVDSETIAETCIAIDC

SEQ ID NO: 40 - protein, 1033 aa, Glycine max
MEASAGLVAGSHNRNELVVIHGHEEHKPLKNLDGQVCEICGDDVGLTVDGDLFVACNECGFPACRPCYEYERREGRQVCPQCKTRYKRLKGSPRVEGDDEEEDVDDIEHEFNIEEQKKHNHSAEAMLHGKMSYGRGPEDDENAQFPAVIAGGRSRPVSGEFPIASHYGDQMLASSLQNRVHPYPASDPRNGKWDEAKEDRMDDWKLQQGNLGPEPDEDPDAAMLDEARQPLSRKVPIASSKVNPYRMVIVARLVILAFFLRYRLMNPVHDALGLWLTSIICEIWFAFSWILDQFPKWYPIDRETYLDRLSIRYEREGEPNMLAPVDVFVSTVDPMKEPPLVTANTVLSILAMDYPVAKISCYISDDGASMCTFEALSETAEFARKWVPFCKKFSIEPRAPEMYFSEKIDYLKDKVQPTFVKERRAMKREYEEFKVRINALVAKAQKVPQGGWIMQDGTPWPGNNTKDHPGMIQVFLGHSGGHDTEGNELPRLVYVSREKRPGFQHHKKAGAMNALIRVSAVLTNAPFMLNLDCDHYVNNSKAAREAMCFLMDPQTGKKVCYVQFPQRFDGIDRHDRYANRNTVFFDINMKGLDGIQGPAYVGTGCVFRRQALYGYNPPKGPKRPKMVSCDCCPCFGKRKKVKYEGNDANGEAASLRGVDDDKEVLMSQMNFEKKFGQSSIFVTSTLMEEGGVPPSASSASQLKEAIHVISCGYEDKTEWGIELGWIYGSITEDILTGFKMHCRGWRSIYCMPKRAAFKGTAPINLSDRLNQVLRWALGSIEIFFSRHCPLWYGYKEGKLKWLERFAYANTTVYPFTSIPLVAYCVLPAVCLLTDKFIMPPISTFAGLYFVALFSSIIATGLLELKWSGVSIEEWWRNEQFWVIGGVSAHLFAVIQGLLKVLAGIDTNFTVTSKAADDEEFGELYTFKWTTLLIPPTTILIINIVGVVAGISDAINNGYQSWGPLFGKLFFSFWVIVHLYPFLKGLMGRQNRTPTIVVIWSVLLASIFSLLWVRIDPFVLKTKGPDTKLCGINC

SEQ ID NO: 41 - protein, 1080 aa, Glycine max
MESEGEAGAKPVTALGAQVCQICSDGVGKTVDGEPFVACDVCAFPVCRPCYEYERKDGNQSCPQCKTRYKRHKGSPAILGDMEEDGAPAADGASDFNYDSENQNQNQNQKQKISERMLSWQLTYSRGEEVGAPNYDKDVSHNHIPLLTSGQEVSGELSAASPERLSMASPAVGGGKRVHNIPYSSDINQSPNIRAGDPGLGNVAWKERVDGWKMKQEKNVVPMSTGLAASERGAGDVDASTDVLVDDSLLNDEARQPLSRKVSIPSSRINPYRMVIMLRLVILCIFLHYRITNPVPNAYPLWLVSVICEIWFAISWILDQFPKWLPVNRETYLDRLALRYDQEGEPSQLAAVDIFVSTVDPLKEPPLVTANTVLSILAVDYPVDKVSCYVSDDGAAMLTFEALAETSEFARKWVPFSKKYSIEPRAPEWYFAQKIDYLKDKVHPSFVKDRRAMKREYEEFKVRVNGLVAKAQKVPEEGWVMQDGTPWPGNNIRDHPGMIQVFLGQSGGLDTEGNELPRLVYVSREKRPGFQHHKKAGAMNALVRVSAVLTNGPFLLNLDCDHYINNSKALREAMCFMMDPNLGKHVCYVQFPQRFDGIDRNDRYANRNTVFFDINLRGLDGIQGPVYVGTGCVFNRTALYGYEPPLKPKHKKPGLLSSLCGGNRKKSSKSSKKGTDKKKSNKHVDPTVPIFNLEDIEEGVEGTGFDDEKSLLMSQMSLEKRFGQSAVFVASTLMENGGVPQSATPETLLKEAIHVISCGYEDKTDWGSEIGWIYGSVTEDILTGFKMHARGWRSIYCMPKRPAFKGSAPINLSDRLNQVLRWALGSVEILFSRHCPIWYGYGGRLKWLERFAYVNTTIYPVTAIPLLIYCILPAVCLLTNKFIIPQISNLASIWFISLFLSIFATGILEMRWSGVGIDEWWRNEQFWVIGGVSAHLFAVFQGLLKVLAGIDTNFTVTSKASDEDGDFAELYMFKWTTLLIPPTTLLIINMIGVVAGISYAINSGYQSWGPLFGKLFFAFWVIIHLYPFLKGLMGRQNRTPTIVVVWSILLASIFSLLWVRIDPFTTRVTGPDVEECGINC

SEQ ID NO: 42 - protein, 958 aa, Glycine max
MVQSSVPLCNTCGEQVGLNANGEVFVACHECNFPICKDCFEHEINEDHRVCMRCGTPHEERTKEEEEDFHEIKVHENEDDDFHEIKVHENQSTTPFQINNSQDVGLHARHVSTVSTVDSVESWKEKDKKNKKKKAAPKEEKDASIPPEQQMEETRPTEAAAAAPLSVVIPMSKSKIAPYRTVIIMRLIILGLFFHYRVTNPVESAFPLWLTSIICEIWFAFSWVLDQFPKWSPINRQTFIDNLSARFEREGEPNELAAVDFFVSTVDPLKEPPLITANTVLSILAVDYPVDKVSCYVSDDGAAMLTFESLVETADFARKWVPFCKKFSIEPRAPEFYFSQKIDYLKDKVQPSFVKEPRAMRDYEEYKVRVNAMVAKAQKTPEEGWTMQDGTPWPGNNSRDHPGMIQVFLGHTGARDIEGNELPRLVYVSREKRPGYQHHKKAGAENALVRVSAVLTNAPFILNLDCDHYVNNSKAVREAMCFLMDPEVGRDVCYVQFPQRFDGIDRSDRYANRNTVFFDVNMKGLDGIQGPVYVGTGCVFNRQALYGYSPPSMPSLPRSSCCCFPSKKSTNDVSDFQRNAKREELEAAIFNLKELDNYDEHERSMLISQMSFEKTFGLSTVFIESTLMENGGVPEAADPSMLIKEAIHVISCGYEEKTLWGKEIGWIYGSVTEDILSGFKMQCRGWKSIYCMPLRPAFKGSAPINLSDRLHQVLRWALGSIEIFLSRHCPLWYGFSGGRLKWLQRMAYINTIVYPFTSLPLVAYCSLPAICLLTGKFIIPTLSNVASVLFLGLFLSIIITSVLELRWSGVSIEDLWRNEQFWVIGGVSAHLFAVFQGLLKMLAGVDTNFTWTTLLIPPTTLIIVNMVGVVAGFSDALNGGYESWGPLFGKVFFAFWVIFHLYPFLKGLMGRQNRTPTIVVLWSVLLASVFSLVWVKINPFVNTVDSETIAETCIAIDC

SEQ ID NO: 43 - protein, 1097 aa, Glycine max
MHTGGRLVAGSHNRNEFVLINADDNGRIKSVRELSGQICQICGDEIEITVDGEPFVACNECAFPVCRPCYEYERREGIQACPQCNTRYKRIKGSPRVEGDEEEDDTDDLDNEFDYGDVDALGPQPMSESLYSGRPNTGRGANNGSGMATNLEHGSAPQNSDIPLLTYGEEDPEISSNSHALIVPSHMNHGNRVHPMPYNDPSIPLQPRPMAPKKDIAVYGYGSVAWKDRMEEWKKRQSDKLQVVKHEGSNDGNFGDDFEDSDLPMMDEGRQPLSRKLPIPSSKINPYRMIIVLRLVVLGLFFHYRILHPVNDAYGLWLTSVICEIWFAVSWIMDQFPKWYPIQRETYLDRLSLRYEKEGKPSELSSVDVFVSTVDPMKEPPLITANTVLSILAVDYPVDKVACYVSDDGAAMLTFEALSETSEFARRWVPFCKKYNIEPRAPEWYFGQKMDYLKNKVHPAFVRERRAMKRDYEEFKVRINSLVATAQKVPEDGWTMQDGTPWPGNNVRDHPGMIQVFLGQDGVRDVEGNELPRLVYVSREKRPGFDHHKKAGAMNALVRASAIITNAPYLLNVDCDHYINNSKALREAMCFMMDPQLGKKVCYVQFPQRFDGIDRHDRYSNRNVVFFDINMKGLDGIQGPIYVGTGCVFRRYALYGYDAPAKKKPPSKTCNCWPKWCCLCCGSRKKKNANTKKEKKRKVKHSEASKQIHALENIEAGNEGTNNEKTSNLTQTKLEKRFGQSPVFVASTLLDNGGVPQGVSPASLLKEAIQVISCGYEDKTEWGKEVGWIYGSVTEDILTGFKMHCHGWRSVYCIPKRPAFKGSAPINLSDRLHQVLRWALGSVEIFFSRHCPIWYGYGGGLKWLERFSYINSVVYPWTSLPLLVYCTLPAICLLTGKFIVPEISNYASIVFMALFISIAATGILEMQWGGVSIDDWWRNEQFWVIGGVSSHLFALFQGLLKVLAGVNTNFTVTSKAADDGEFSELYIFKWTSLLIPPMTLLIMNIVGVVVGVSDAINNGYDSWGPLFGRLFFALWVILHLYPFLKGLLGKQDRMPTIILVWSILLASILTLMWVRINPFVSRDGPVLEICGLNCDES

SEQ ID NO: 44 - protein, 1073 aa, Glycine max
MTESEEAGAKPMNTLGGQVCQICGDNIGNNVNGDPFIACDVCAFPVCRACYEYERKDGNQSCPQCKTRYKRHKGSPAILGDQEEDGGADEGASDLNYNSENQNEKQKIERMLGWQMAHGRAEEAVAPNYDKEVSHNHIPLLSGGQEVSGELSAASPERLSMASPGGRGKRVHNLQYSSDLNQSPNIRVGDPGLGNVAWKERVDGWKMKQDKNVAPMSTGQATSERGAGDIDASTDVLVDDSLLNDEARQPLSRKVSIPSSRINPYRMVIALRLVILCIFLHYRITNPVPNAYALWLISVICEIWFAISWIFDQFPKWLPVNRETYLDRLALRYDQEGEPSQLAAVDIFVSTVDPLKEPPLVTANTVLSILSVDYPVDKVSCYVSDDGAAMLTFEALAETSEFARKWVPFSKKYNIEPRAPEWYFAQKIDYLKDKVQPSFVKDRRAMKREYEEFKIRVNGLVAKAQKVPEEGWVMQDGTPWPGNNTRDHPGMIQVFLGQSGGLDTEGNELPRLVYVSREKRPGFQHHKKAGAMNALVRVSAVLTNGPFLLNLDCDHYINNSKALREAMCFMMDPNLGKNVCYVQFPQRFDGIDRNDRYANRNTVFFDINLRGLDGIQGPVYVGTGCVFNRTALYGYEPPIKPKHKKPGLLSSLCGGNRKKRSKSSKKGSDKKKSSKNVDPTVPIFSLEDIEEGVEGAGFDDEKSLLMSQMSLEKRFGQSAVFVASTLMENGGVPQSATPETLLKEAIHVISCGYEDKTEWGSEIGWIYGSVTEDILTGFKMHARGWRSIYCMPKLPAFKGSAPINLSDRLNQVLRWALGSVEILFSRHCPIWYGYSGRLKWLERFAYVNTTIYPVTSIPLLMYCTLPAVCLLTNKFIIPQISNIASIWFISLFLSIFATGILEMRWSGVGIDEWWRNEQFWVIGGVSAHLFAVFQGLLKVLAGIDTNFTVTSKASDEDGDFAELYLFKWTTLLIPPTTLLIINLVGVVAGISYAINSGYQSWGPLFGKLFFAFWVIIHLYPFLKGLMGRQNRTPTIVVVWSILLASIFSLLWVRIDPFTTRVTGPDVEQCGINC

SEQ ID NO: 45 - protein, 1074 aa, Glycine max
MMESEGEAGAKPMKTLGGKICQICGDNIGNNANGDPFIACDVCAFPVCRACYEYERKDGNQSCPQCKTRYKRHKGSPAILGDREEDGGADDGASDFNYNSENQNEKQKIEHMLGWQMAYGRAEEAIAPNYDKEVSHNHIPLLSGGQEVSGELSAASPERLSMASPGGRGKRAHNLQYSSDLNHSPNIRVGDPGLGNVAWKERVDGWKMKQDKNVAPMSTGQATSERGAGDIDASTDVLVDDSLLNDEARQPLSRKVSIPSSRINPYRMVIALRLVILCIFLHYRITNPVPNAYALWLISVICEIWFAISWILDQFPKWLPVNRETYLDRLALRYDREGEPSQLAAVDIFVSTVDPLKEPPLVTANTVLSILSVDYPVDKVSCYVSDDGAAMLTFEALAETSEFARKWVPFSKKYNIEPRAPEWYFAQKIDYLKDKVQPSFVKDRRAMKREYEEFKIRINGLVAKAQKIPEEGWVMQDGTPWPGNNTRDHPGMIQVFLGQSGGLDTEGNELPRLVYVSREKRPGFQHHKKAGAMNALVRVSAVLTNGPFLLNLDCDHYINNSKALREAMCFMMDPNLGKNVCYVQFPQRFDGIDRNDRYANRNTVFFDINLRGLDGIQGPVYVGTGCVFNRTALYGYEPPIKPKHKKPGFLSSLCGGNRKKRSKSSKKGSDKKKSSKNVDPTVPIFSLEDIEEGVEGAGFDDEKSLLMSQMSLEKRFGQSAVFVASTLMENGGVPQSATPETLLKEAIHVISCGYEDKSEWGSEIGWIYGSVTEDILTGFKMHARGWRSIYCMPKLPAFKGSAPINLSDRLNQVLRWALGSVEILFSRHCPIWYGYSGRLKWLERFAYVNTTIYPVTSIPLLMYCTLPAVCLLTNKFIIPQISNIASIWFISLFLSIFATGILEMRWSGVGIDEWWRNEQFWVIGGVSAHLFAVFQGLLKVLAGIDTNFTVTSKASDEDGDFAELYMFKWTTLLIPPTTLLIINLVGVVAGISYAINSGYQSWGPLFGKLFFAFWVIIHLYPFLKGLMGRQNRTPTIVVVWSILLASIFSLLWVRIDPFTTRVTGPDVEQCGINC

SEQ ID NO: 46 - protein, 1095 aa, Glycine max
MDTKGRLVAGSHNRNEFVLINADETARVNAVTELSGQICQICGDEIEVTVDGEPFVACNECAFPVCRPCYEYERREGNKICPQCKTIYKRLKGSPRVEGDEEEEDIDDLENEFDIGSNIRHDPHHVAEALLSARLNAARGSQMNAPGITTPSEFDAASVAADIPLLTYDHEDVGISADKHALIIPPFMHHGKRVHPMPPDSSVPVQPRPMDPKKDLAVYGYGSVAWKERMEEWKKRQNEKIEVVKHEGGNDGGKNGDELDDPDLPKMDEGRQPLWRKLPISPSKINPYRIIIVLRIAVLGLFFHYRILHPVNDAYALWLTSVICEIWFAVSWILDQFPKWCPIERETYLDRLSSRYEKEGKPSELADIDVFVSTVDPMKEPPLITANTVLSILAVDYPVEKVSCYVSDDGAAMLTFEAISETSEFARKWVPFCKKFNIEPRAPEWYFAQKVDYLKDKVDATFIRERRAIKREYEEFKVRINALVAMAQKVPEDGWTMQDGTPWPGNSVRDHPGMIQVFLGQNGIHNIEGNELPRLVYVSREKRPGYEHHKKAGAMNALVRVSAVISNAPYLLNVDCDHYINNSKALREAMCFMMDPTSGKKICYVQFPQRFDGIDRHDRYSNRNVVFFDINMKGLDGIQGPIYVGTGCVFRRQALYGYDAPATKKPPRKTCNCWPKWCCLCCGSRNKNRKVKSGPRKKIKNKDATKQIHALENIEEGIEGIDSEKSWLMSQLKFEKKFGQSAVFIASTLMEDGGILKGATSASLLKEAIHVISCGYEDKTEWGKEVGWIYGSVTEDILTGFKMHCHGWRSVYCMPKRPAFKGSAPINLSDRLHQVLRWALGSVEILLSKHCPIWYGYGCGLKWLERFSYINSVIYPLTSLPLIAYCTLPAVCLLTGKFIVPEISNYASIIFMALFISIAVTSILEMQWGGVGIHDWWRNEQFWVIGGASSHLFALFQGLLKVLAGVNTNFTVTSKAADGGDFAELYLFKWTSLLIPPLTLLIINIIGVIVGVSDAINNGYDSWGPLFGKLFFALWVIVHLYPFLKGVMGKQEGVPTIILVWAILLASIFSLLWVRINPFLSKGGIVLELCGLNCD

SEQ ID NO: 47 - protein, 1078 aa, Glycine max
MDTKGRLVAGSHNRNEFVLINADETARVAVTELSGQICQICGDELEVTVNGEPFVACNECAFPVCRPCYEYERREGNQVCPQCKTRYKRIKGSPRVEGDEEEDDTDDLESEFDIGSVFSARLNYGSQVNGSVIHAPSEFDAASVASEIPLLTYGQEDVGISADKHALILPPFTARGKRVYPMPFPDSSVPVQPRPMDPKKDIAVYGYGSVAWKERMEDWKKKQSEKLQVVRHEGDKDSDELDDPDLPKMDEGRQPLWRKLPISSSRINPYRIIIVLRIAILCLFFHYRILHPVNDAYALWLTSVICEIWFAVSWIFDQFPKWSPILRETYLDRLSLRYEKEGKPSQLSDIDVFVSTVDPMKEPPLITANTVLSILAVDYPVDKVACYVSDDGAAMLTFEALSETSEFARKWVPFCKKFCIEPRAPEWYFAQKVDYLKDKVDATFIRERRAIKREYEEFKVRINALVALAQKVPEDGWTMQDGTPWPGNNVRDHPGMIQVFLGQNGVRDIEGNELPRLVYVSREKRPGYDHHKKAGAMNALVRVSAIITNAPYVLNVDCDHYINNSKALREAMCFMMDPTSGKKICYVQFPQRFDGIDRHDRYSNRNVVFFDINMKGLDGIQGPIYVGTGCVFRRQAFYGCDAPTSKKAPRKTCNCWPKWCCCLCCGSRKKKIKAKSSVKKKIKNKDDLKQMHALENIEEGIEGIDNEKSSLMSQSKFEKKFGQSSVFIASTLLEDGGVPKAASSATLLKEAIHVISCGYEDKTEWGKEVGWIYGSVTEDILTGFKMHCHGWRSVYCMPKRPAFKGSAPINLSDRLHQVLRWALGSVEIFFSRHCPIWYGYGGGLKSLERFSYINSVVYPLTSIPLIAYCALPAVCLLTGKFIVPEISNYASIIFMALFISIAATGILEMQWGGVGIHDWWRNEQFWVIGGASSHLFALFQGLLKVLAGVNTNFTVTSKAADDGEFAELYIFKWTSLLIPPLTLLILNIIGVIVGVSDAINNGYDSWGPLFGRLFFALWVIVHLYPFLKGVMGKQEGVPTIILVWAILLASILTLLWVRINPFLAKNDVVLEICGLNCD

SEQ ID NO: 48 - protein, 989 aa, Oryza sativa
MMESGVPPCAACGDDAHAACRACSYALCKACLDEDAAEGRTTCARCGGEYGAPDPAHGQGAVVEEEVEESHEPAAGGVRERVTMASQLSDHQDEGVHARTMSTHARTISSVSGVGSELNDESGKPIWKNRVESWKEKKKEKKASAKKAAAKAQAPPVEEQIMDEKDLTDAYEPLSRIIPISKNKLTPYRAVIIMRLVVLGLFFHYRITNPVYSAFGLWMTSVICEIWFGFSWILDQFPKWCPINRETYVDRLIARYGDGEDSGLAPVDFFVSTVDPLKEPPLITANTVLSILAVDYPVEKISCYVSDDGSAMLTFESLAETAEFARRWVPFCKKYSIEPRAPEFYFSQKIDYLKDKIHPSFVKERRAMKRDYEEYKVRINALVAKAQKTPEEGWIMQDGTPWPGNNPRDHPGMIQVFLGETGARDFDGNELPRLVYVSREKRPGYQHHKKAGAMNALVRVSAVLTNAPYILNLDCDHYVNNSKAVREAMCFMMDPSVGRDVCYVQFPQRFDGIDRSDRYANRNVVFFDVNMKGLDGLQGPVYVGTGCCFYRQALYGYGPPSLPALPKSSVCSWCCCCCPKKKAEKSEKEMHRDSRREDLESAIFNLREIDNYDEYERSMLISQMSFEKSFGLSSVFIESTLMENGGVPESANPSTLIKEAIHVISCGYEEKTEWGKEIGWIYGSVTEDILTGFKMHCRGWRSIYCMPIRPAFKGSAPINLSDRLHQVLRWALGSVEIFLSRHCPLWYGYGGGRLKWLQRLSYINTIVYPFTSLPLIAYCCLPAICLLTGKFIIPTLSNAATIWFLGLFISIIVTSVLELRWSGIGIEDWWRNEQFWVIGGVSAHLFAVFQGILKMIAGLDTNFTVTAKATDDTEFGELYVFKWTTVLIPPTSILVLNLVGVVAGFSDALNSGYESWGPLFGKVFFAMWVIMHLYPFLKGLMGRQNRTPTIVVLWSVLLASVFSLLWVKIDPFIGSSETTTTNSCANFDC

SEQ ID NO: 49 - protein, 1073 aa, Oryza sativa
MDGAKSGKQCHVCQICGDGVGTAADGELFTACDVCGFPVCRPCYEYERKDGSQACPQCKTKYKRHKGSPPILGDESDDVDADDASDVNYPTSGNQDHKHKIAERMLTWRMNSGRNDDIVHSKYDSGEIGHPKYDSGEIPRIYIPSLTHSQISGEIPGASPDHMMSPVGNIGRRGHPFPYVNHSPNPSREFSGSLGNVAWKERVDGWKMKDKGAIPMANGTSIAPSEGRGVGDIDASTDYNMEDALLNDETRQPLSRKVPISSSRINPYRMVIVLRLIVLCIFLHYRITNPVRNAYPLWLLSVICEIWFALSWILDQFPKWSPINRETYLDRLALRYDREGEPSQLAPVDIFVSTVDPMKEPPLVTANTVLSILAVDYPVDKVSCYVSDDGAAMLTFDALAETSEFARKWVPFCKKYSIEPRAPEWYFAQKIDYLKDKVQASFVKDRRAMKREYEEFKVRVNALVAKAQKVPEEGWIMQDGTPWPGNNTRDHPGMIQVFLGHSGGLDTEGNELPRLVYVSREKRPGFQHHKKAGAMNALVRVSAVLTNGQYLLNLDCDHYINNSKALREAMCFLMDPNLGRRVCYVQFPQRFDGIDRNDRYANRNTVFFDINLRGLDGLQGPVYVGTGCVFNRTALYGYEPPIKQKRPGYFSSLCGGRKKTKKSKEKSTEKKKSHKHVDSSVPVFNLEDIEEGIEGSGFDDEKSLLMSQMSLEKRFGQSSVFVASTLMEYGGVPQSATPESLLKEAIHVISCGYEDKSDWGTEIGWIYGSVTEDILTGFKMHARGWRSIYCMPKRPAFKGSAPINLSDRLNQVLRWALGSVEILFSRHCPIWYGYGGRLKFLERFAYINTTIYPLTSIPLLLYCILPAICLLTGKFIIPEISNFASIWFISLFLSIFATGILEMRWSGVGIDEWWRNEQFWVIGGISAHLFAVFQGLLKVLAGIDTSFTVTSKASDEEGDFAELYMFKWTTLLIPPTTILIINLVGVVAGISYAINSGYQSWGPLFGKLFFAFWVIVHLYPFLKGLMGRQNRTPTIVVVWAILLASIFSLLWVRIDPFTTRVTGPDTQKCGINC

SEQ ID NO: 50 - protein, 1092 aa, Oryza sativa
MEASAGLVAGSHNRNELVVIRRDGEPGPKPVKHTNGQVCQICGDDVGLTPDGEPFVACNECAFPVCRDCYEYERREGTQNCPQCKTRFKRLKGCARVPGDEEEEDVDDLENEFNWRDKTDSQYVAESMLHGHMSYGRGGDLDGVPQHFQPIPNVPLLTNGEMADDIPPEQHALVPSFMGGGGKRIHPLPYADPNLPVQPRSMDPSKDLAAYGYGSVAWKERMESWKQKQERLHQMRNDGGGKDWDGDGDDADLPLMDEARQPLSRKIPISSSLVNPYRMIIIIRLVVLGFFFHYRVMHPVPDAFALWLISVICEIWFAMSWILDQFPKWFPIERETYLDRLTLRFDKEGQQSQLAPVDFFVSTVDPMKEPPLVTANTVLSILAVDYPVDKVSCYVSDDGAAMLTFEALSETSEFAKKWVPFCKRYSLEPRAPEWYFQQKIDYLKDKVAPNFVRERRAMKREYEEFKVRINALVAKAQKVPEEGWTMQDGTPWPGNNVRDHPGMIQVFLGQSGGHDVEGNELPRLVYVSREKRPGYNHHKKAGAMNALVRVSAVLTNAPYMLNLDCDHYINNSKAIKEAMCFMMDPLVGKKVCYVQFPQRFDGIDRHDRYANRNVVFFDINMKGLDGIQGPIYVGTGCVFRRQALYGYDAPKSKKPPSRTCNCWPKWCICCCCFGNRTNKKKTAKPKTEKKKRLFFKRAENQSPAYALGEIDEGAPGAENEKAGIVNQQKLEKKFGQSSVFVASTLLENGGTLKSASPASLLKEAIHVISCGYEDKTDWGKEIGWIYGSVTEDILTGFKMHCHGWRSIYCIPKRAAFKGSAPLNLSDRLHQVLRWALGSIEIFFSNHCPLWYGYGGGLKCLERFSYINSIVYPWTSIPLLAYCTLPAICLLTGKFITPELTNIASLWFMSLFICIFATGILEMRWSGVGIDDWWRNEQFWVIGGVSSHLFAVFQGLLKVIAGIDTSFTVTSKGGDDEEFSELYTFKWTTLLIPPTTLLLLNFIGVVAGVSNAINNGYESWGPLFGKLFFAFWVIVHLYPFLKGLVGRQNRTPTIVIVWSILLASIFSLLWVRIDPFLAKNDGPLLEECGLDCN

SEQ ID NO: 51 - protein, 1076 aa, Oryza sativa
MAANAGMVAGSRNRNEFVMIRPDGDAPPPAKPGKSVNGQVCQICGDTVGVSATGDVFVACNECAFPVCRPCYEYERKEGNQCCPQCKTRYKRHKGSPRVQGDEEEEDVDDLDNEFNYKHGNGKGPEWQIQRQGEDVDLSSSSRHEQHRIPRLTSGQQISGEIPDASPDRHSIRSGTSSYVDPSVPVPVRIVDPSKDLNSYGINSVDWQERVASWRNKQDKNMMQVANKYPEARGGDMEGTGSNGEDMQMVDDARLPLSRIVPIPSNQLNLYRIVIILRLIILMFFFQYRVTHPVRDAYGLWLVSVICEIWFALSWLLDQFPKWYPINRETYLDRLALRYDREGEPSQLAPIDVFVSTVDPLKEPPLITANTVLSILAVDYPVDKVSCYVSDDGSAMLTFEALSETAEFARKWVPFCKKHNIEPRAPEFYFAQKIDYLKDKIQPSFVKERRAMKREYEEFKVRINALVAKAQKVPEEGWTMADGTAWPGNNPRDHPGMIQVFLGHSGGLDTDGNELPRLVYVSREKRPGFQHHKKAGAMNALIRVSAVLTNGAYLLNVDCDHYFNSSKALREAMCFMMDPALGRKTCYVQFPQRFDGIDLHDRYANRNIVFFDINMKGLDGIQGPVYVGTGCCFNRQALYGYDPVLTEADLEPNIVVKSCCGGRKKKSKSYMDSKNRMMKRTESSAPIFNMEDIEEGIEGYEDERSVLMSQKRLEKRFGQSPIFIASTFMTQGGIPPSTNPASLLKEAIHVISCGYEDKTEWGKEIGWIYGSVTEDILTGFKMHARGWISIYCMPPRPCFKGSAPINLSDRLNQVLRWALGSVEILLSRHCPIWYGYNGRLKLLERLAYINTIVYPITSIPLIAYCVLPAICLLTNKFIIPEISNYAGMFFILLFASIFATGILELRWSGVGIEDWWRNEQFWVIGGTSAHLFAVFQGLLKVLAGIDTNFTVTSKASDEDGDFAELYVFKWTSLLIPPTTVLVINLVGMVAGISYAINSGYQSWGPLFGKLFFSIWVILHLYPFLKGLMGRQNRTPTIVIVWSILLASIFSLLWVKIDPFISPTQKAVALGQCGVNC

SEQ ID NO: 52 - protein, 1170 aa, Oryza sativa
MASSGGGGLRHSNSSRLSRMSYSGEDGRAQAPGGGGDRPMVTFARRTHSGRYVSYSRDDLDSELGNSGDMSPESGQEFLNYHVTIPATPDNQPMDPAISARVEEQYVSNSLFTGGFNSVTRAHLMDKVIESEASHPQMAGAKGSSCAINGCDAKVMSDERGDDILPCECDFKICADCFADAVKNGGACPGCKDPYKATELDDVVGARPTLSLPPPPGGLPASRMERRLSIMRSQKAMTRSQTGDWDHNRWLFETKGTYGYGNAIWPKENEVDNGGGGGGGGGLGGGDGQPAEFTSKPWRPLTRKLKIPAGVLSPYRLLILIRMAVLGLFLAWRIKHKNEDAMWLWGMSVVCELWFGLSWLLDQLPKLCPVNRATDLAVLKDKFETPTPSNPNGRSDLPGLDIFVSTADPEKEPPLVTANTILSILAADYPVEKLSCYVSDDGGALLTFEAMAEAASFANMWVPFCRKHDIEPRNPESYFNLKRDPYKNKVRSDFVKDRRRVKREYDEFKVRINSLPDSIRRRSDAYHAREEIKAMKRQREAALDDVVEAVKIPKATWMADGTHWPGTWIQPSAEHARGDHAGIIQVMLKPPSDDPLYGTSGEEGRPLDFTEVDIRLPMLVYVSREKRPGYDHNKKAGAMNALVRSSAVMSNGPFILNLDCDHYVYNSQAFREGMCFMMDRGGDRIGYVQFPQRFEGIDPSDRYANHNTVFFDVNMRALDGIMGPVYVGTGCLFRRIALYGFDPPRSKEHSGCCSCCFPQRRKVKTSTVASEERQALRMADFDDEEMNMSQFPKKFGNSNFLINSIPIAEFQGRPLADHPGVKNGRPPGALTVPRDLLDASTVAEAISVISCWYEDKTEWGQRVGWIYGSVTEDVVTGYRMHNRGWKSVYCVTKRDAFRGTAPINLTDRLHQVLRWATGSVEIFFSRNNALLASRKMKFLQRIAYLNVGIYPFTSIFLIVYCFLPALSLFSGQFIVRTLNVTFLTYLLVITLTMCMLAVLEIKWSGISLEEWWRNEQFWLIGGTSAHLAAVLQGLLKVIAGIEISFTLTSKSGGDEADDEFADLYIVKWTSLMIPPIVIMMVNLIAIAVGFSRTIYSEIPQWSKLLGGVFFSFWVLAHLYPFAKGLMGRRGRTPTIVFVWSGLLAITISLLWVAINPPSQNSQIGGSFTFP

SEQ ID NO: 53 - protein, 1012 aa, Oryza sativa
MSVDYANYTVLMPPTPDNQPSGGAPPAAPSAGGARPGDLPLPPYGSSSSSRLVNRRGGGDDGAKMDRRLSTARVPAPSSNKSLLVRSQTGDFDHNRWLFETKGTYGIGNAYWPQDNVYGDDGGGGAVKMEDLVEKPWKPLSRKVPIPPGILSPYRLLVLVRFVALFLFLVWRVTNPNMDALWLWGISIVCEFWFAFSWLLDQMPKLNPINRAADLAALKEKFESPSPTNPTGRSDLPGLDVFISTADPYKEPTLVTANTLLSILATEYPVEKLFVYISDDGGALLTFESMAEACAFAKVWVPFCRKHSIEPRNPDSYFTQKGDPTKGKKRPDFVKDRRWIKREYDEFKIRVNSLPDLIRRRANALNARERKLARDKQAAGDADALASVKAATWMADGTHWPGTWLDPSPDHAKGDHASIVQVMIKNPHHDVVYGEAGDHPYLDMTDVDMRIPMFAYLSREKRAGYDHNKKAGAMNAMVRASAILSNGPFMLNFDCDHYIYNCQAIREAMCYMLDRGGDRICYIQFPQRFEGIDPSDRYANHNTVFFDGNMRALDGLQGPMYVGTGCLFRRYAIYGFNPPRAIEYRGTYGQTKVPIDPRQGSEAMPGAGGGRSGGGSVGGDHELQALSTAHPDHEAPQKFGKSKMFIESIAVAEYQGRPLQDHPSVLNGRPPGALLMPRPPLDAATVAESVSVISCWYEDNTEWGQRVGWIYGSVTEDVVTGYRMHNRGWRSVYCITRRDAFRGTAPINLTDRLHQVLRWATGSVEIFFSKNNAVLASRRLKFLQRMAYLNVGIYPFTSLFLIMYCLLPALSLFSGQFIVATLDPTFLSYLLLITITLMLLCLLEVKWSGIGLEEWWRNEQFWVIGGTSAHLAAVLQGLLKVVAGIEISFTLTAKAAAEDDDDPFAELYLIKWTSLFIPPLAVIGINIIALVVGVSRTVYAEIPQYSKLLGGGFFSFWVLAHYYPFAKGLMGRRGRTPTIVYVWAGLISITVSLLWITISPPDDSVAQGGIDV

SEQ ID NO: 54 - protein, 860 aa, Oryza sativa
MDGESPEIMPVECPDPEPASSESGDDHDIPEPLSSRLSVPSGELNLYRAAVALRLVLLAAFFRYRVTRPVADAHALWVTSVACELWLAASWLIAQLPKLSPANRVTYLDRLASRYEKGGEASRLAGVDVFVAAADAAREPPLATANTVLSVLAADYPAGGVACYVHDDGADMLVFESLFEAAGFARRWIPFCRRHGVEPRAPELYFARGVDYLRDRAAPSFVKDRRAMKREYEEFKVRMNHLAARARKVPEEGWIMSDGTPWPGNNSRDHPAMIQVLLGHPGDRDVDGGELPRLFYVSREKRPGFRHHGKAGAMNALLRVSAVLTNGAYVLNLDCDHCVNNSSALREAMCFMMDPVAGNRTCFVQFALRDSGGGDSVFFDIEMKCLDGIQGPVYVGSGCCFSRKALYGFEPAAAADDGDDMDTAADWRRMCCFGRGKRMNAMRRSMSAVPLLDSEDDSDEQEEEEAAGRRRRLRAYRAALERHFGQSPAFIASAFEEQGRRRGGDGGSPDATVAPARSLLKEAIHVVSCAFEERTRWGKEIGWMYGGGVATGFRMHARGWSSAYCSPARPAFRRYARASPADVLAGASRRAVAAMGILLSRRHSPVWAGRRLGLLQRLGYVARASYPLASLPLTVYCALPAVCLLTGKSTFPSDVSYYDGVLLILLLFSVAASVALELRWSRVPLRAWWRDEKLWMVTATSASLAAVFQGILSACTGIDVAFSTETAASPPKRPAAGNDDGEEEAALASEITMRWTNLLVAPTSVVVANLAGVVAAVAYGVDHGYYQSWGALGAKLALAGWVVAHLQGFLRGLLAPRDRAPPTIAVLWSVVFVSVASLLWVHAASFSAPTAAPTTEQPIL

SEQ ID NO: 55 - protein, 1081 aa, Oryza sativa
MDGDADAVKSGRHGSGQACQICGDGVGTTAEGDVFAACDVCGFPVCRPCYEYERKDGTQACPQCKTKYKRHKGSPAIRGEEGEDTDADDVSDYNYPASGSADQKQKIADRMRSWRMNAGGGGDVGRPKYDSGEIGLTKYDSGEIPRGYIPSVTNSQISGEIPGASPDHHMMSPTGNIGKRAPFPYVNHSPNPSREFSGSIGNVAWKERVDGWKLKQDKGAIPMTNGTSIAPSEGRGVGDIDASTDYNMEDALLNDETRQPLSRKVPLPSSRINPYRMVIVLRLVVLSIFLHYRITNPVRNAYPLWLLSVICEIWFALSWILDQFPKWFPINRETYLDRLALRYDREGEPSQLAAVDIFVSTVDPMKEPPLVTANTVLSILAVDYPVDKVSCYVSDDGAAMLTFDALAETSEFARKWVPFVKKYNIEPRAPEWYFSQKIDYLKDKVHPSFVKDRRAMKREYEEFKVRINGLVAKAQKVPEEGWIMQDGTPWPGNNTRDHPGMIQVFLGHSGGLDTEGNELPRLVYVSREKRPGFQHHKKAGAMNALVRVSAVLTNGQYMLNLDCDHYINNSKALREAMCFLMDPNLGRSVCYVQFPQRFDGIDRNDRYANRNTVFFDINLRGLDGIQGPVYVGTGCVFNRTALYGYEPPIKQKKKGSFLSSLCGGRKKASKSKKKSSDKKKSNKHVDSAVPVFNLEDIEEGVEGAGFDDEKSLLMSQMSLEKRFGQSAAFVASTLMEYGGVPQSATPESLLKEAIHVISCGYEDKTEWGTEIGWIYGSVTEDILTGFKMHARGWRSIYCMPKRPAFKGSAPINLSDRLNQVLRWALGSVEILFSRHCPIWYGYGGRLKFLERFAYINTTIYPLTSIPLLIYCVLPAICLLTGKFIIPEISNFASIWFISLFISIFATGILEMRWSGVGIDEWWRNEQFWVIGGISAHLFAVFQGLLKVLAGIDTNFTVTSKASDEDGDFAELYMFKWTTLLIPPTTILIINLVGVVAGISYAINSGYQSWGPLFGKLFFAFWVIVHLYPFLKGLMGRQNRTPTIVVVWAILLASIFSLLWVRIDPFTTRVTGPDTQTCGINC

SEQ ID NO: 56 - protein, 1092 aa, Oryza sativa
MEASAGLVAGSHNRNELVVIRRDGGGGGGVGGRRAAEAKAACQICGDDVGEGPDGEPFVACNECAFPVCRNCYDYERREGSQACPQCKTRFKRLKGCPRVAGDEEEDGVDDLEGEFGLDGREDDPQYIAESMLRANMSYGRGGDLQPFQPIPNVPLLTNGQMVDDIPPEQHALVPSYMGGGGGGGKRIHPLPFADPSVPVQPRSMDPSKDLAAYGYGSVAWKERMEGWKQKQERMQQLRSEGGGDWDGDGDADLPLMDEARQPLSRKVPISSSRINPYRMIIIIRLVVLGFFFHYRVMHPVNDAFALWLISVICEIWFAMSWILDQFPKWLPIERETYLDRLSLRFDKEGQPSQLAPVDFFVSTVDPSKEPPLVTANTVLSILSVDYPVEKVSCYVSDDGAAMLTFEALSETSEFAKKWVPFCKKFNIEPRAPEWYFQQKIDYLKDKVAASFVRERRAMKRDYEEFKVRINALVAKAQKVPEEGWTMQDGSPWPGNNVRDHPGMIQVFLGQSGGRDVEGNELPRLVYVSREKRPGYNHHKKAGAMNALVRVSAVLSNAPYLLNLDCDHYINNSKAIREAMCFMMDPLVGKKVCYVQFPQRFDGIDRHDRYANRNVVFFDINMKGLDGIQGPIYVGTGCVFRRQALYGYDAPKTKKPPSRTCNCWPKWCCCCCCGNRHTKKKTTKPKPEKKKRLFFKKAENQSPAYALGEIEEGAPGAETDKAGIVNQQKLEKKFGQSSVFVASTLLENGGTLKSASPASLLKEAIHVISCGYEDKTDWGKEIGWIYGSITEDILTGFKMHCHGWRSIYCIPKRPAFKGSAPLNLSDRLHQVLRWALGSVEIFFSKHCPLWYGYGGGLKFLERFSYINSIVYPWTSIPLLAYCTLPAICLLTGKFITPELTNVASLWFMSLFICIFVTGILEMRWSGVAIDDWWRNEQFWVIGGVSSHLFAVFQGLLKVLAGVDTSFTVTSKAGDDEEFSELYTFKWTTLLIPPTTLLLLNFIGVVAGVSNAINNGYESWGPLFGKLFFAFWVIVHLYPFLKGLVGRQNRTPTIVIVWSILLASIFSLLWVRIDPFLAKNNGPLLEECGLDCN

SEQ ID NO: 57 - protein, 1093 aa, Oryza sativa
MEASAGLVAGSHNRNELVVIRRDGDPGPKPLRQQNGQVCQICGDDVGLNPDGEPFVACNECAFPVCRDCYEYERREGTQNCPQCKTRFKRLRGCARVPGDEEEDGVDDLENEFNWRDRNDSQYVAESMLHAHMSYGRGGVDVNGVPQPFQPNPNVPLLTDGQMVDDIPPEQHALVPSFMGGGGKRIHPLPYADPNLPVQPRSMDPSKDLAAYGYGSVAWKERMESWKQKQERLHQMRNDGGGKDWDGDGDDGDLPLMDEARQPLSRKVPIPSSQINPYRMVIIIRLVVLGFFFHYRVMHPVPDAFALWLISVICEIWFAMSWILDQFPKWFPIERETYLDRLTLRFDKEGQTSQLAPIDFFVSTVDPLKEPPLVTANTVLSILAVDYPVDKVSCYVSDDGAAMLTFEALSETSEFAKKWVPFCKKYSIEPRAPEWYFQQKIDYLKDKVAPYFVRERRAMKREYEEFKVRINALVAKAQKVPEEGWTMQDGTPWPGNNVRDHPGMIQVFLGQSGGHDIEGNELPRLVYVSREKRPGYNHHKKAGAMNALVRVSAVLTNAPYMLNLDCDHYINNSKAIKEAMCFMMDPLVGKKVCYVQFPQRFDGIDRHDRYANRNVVFFDINMKGLDGIQGPIYVGTGCVFRRQALYGYDAPKTKKPPSRTCNCWPKWCICCCCFGDRKSKKKTTKPKTEKKKRSFFKRAENQSPAYALGEIEEGAPGAENEKAGIVNQQKLEKKFGQSSVFVASTLLENGGTLKSASPASLLKEAIHVISCGYEDKTDWGKEIGWIYGSVTEDILTGFKMHCHGWRSIYCIPKLPAFKGSAPLNLSDRLHQVLRWALGSVEIFFSNHCPLWYGYGGGLKCLERFSYINSIVYPFTSIPLLAYCTLPAICLLTGKFITPELTNVASLWFMSLFICIFATGILEMRWSGVGIDDWWRNEQFWVIGGVSSHLFALFQGLLKVIAGIDTSFTVTSKGGDDEEFSELYTFKWTTLLIPPTTLLLLNFIGVVAGVSNAINNGYESWGPLFGKLFFAFWVIVHLYPFLKGLVGRQNRTPTIVIVWSILLASIFSLLWVRIDPFLAKNDGPLLEECGLDCN

SEQ ID NO: 58 - protein, 837 aa, Oryza sativa
MDEARQPLSRKVPIPSSQINPYRMVIIIRLVVLGFFFHYRVMHPVPDAFALWLISVICEIWFAMSWILDQFPKWFPIERETYLDRLTLRFDKEGQTSQLAPIDFFVSTVDPLKEPPLVTANTVLSILAVDYPVDKVSCYVSDDGAAMLTFEALSETSEFAKKWVPFCKKYSIEPRAPEWYFQQKIDYLKDKVAPYFVRERRAMKREYEEFKVRINALVAKAQKVPEEGWTMQDGTPWPGNNVRDHPGMIQVFLGQSGGHDIEGNELPRLVYVSREKRPGYNHHKKAGAMNALVRVSAVLTNAPYMLNLDCDHYINNSKAIKEAMCFMMDPLVGKKVCYVQFPQRFDGIDRHDRYANRNVVFFDINMKGLDGIQGPIYVGTGCVFRRQALYGYDAPKTKKPPSRTCNCWPKWCICCCCFGDRKSKKKTTKPKTEKKKRSFFKRAENQSPAYALGEIEEGAPGAENEKAGIVNQQKLEKKFGQSSVFVASTLLENGGTLKSASPASLLKEAIHVISCGYEDKTDWGKEIGWIYGSVTEDILTGFKMHCHGWRSIYCIPKLPAFKGSAPLNLSDRLHQVLRWALGSVEIFFSNHCPLWYGYGGGLKCLERFSYINSIVYPFTSIPLLAYCTLPAICLLTGKFITPELTNVASLWFMSLFICIFATGILEMRWSGVGIDDWWRNEQFWVIGGVSSHLFALFQGLLKVIAGIDTSFTVTSKGGDDEEFSELYTFKWTTLLIPPTTLLLLNFIGVVAGVSNAINNGYESWGPLFGKLFFAFWVIVHLYPFLKGLVGRQNRTPTIVIVWSILLASIFSLLWVRIDPFLAKNDGPLLEECGLDCN

SEQ ID NO: 59 - protein, 966 aa, Oryza sativa
MLHAHMSYGRGGVDVNGVPQPFQPNPNVPLLTDGQMVDDIPPEQHALVPSFMGGGGKRIHPLPYADPNLPVQPRSMDPSKDLAAYGYGSVAWKERMESWKQKQERLHQMRNDGGGKDWDGDGDDGDLPLMDEARQPLSRKVPIPSSQINPYRMVIIIRLVVLGFFFHYRVMHPVPDAFALWLISVICEIWFAMSWILDQFPKWFPIERETYLDRLTLRFDKEGQTSQLAPIDFFVSTVDPLKEPPLVTANTVLSILAVDYPVDKVSCYVSDDGAAMLTFEALSETSEFAKKWVPFCKKYSIEPRAPEWYFQQKIDYLKDKVAPYFVRERRAMKREYEEFKVRINALVAKAQKVPEEGWTMQDGTPWPGNNVRDHPGMIQVFLGQSGGHDIEGNELPRLVYVSREKRPGYNHHKKAGAMNALVRVSAVLTNAPYMLNLDCDHYINNSKAIKEAMCFMMDPLVGKKVCYVQFPQRFDGIDRHDRYANRNVVFFDINMKGLDGIQGPIYVGTGCVFRRQALYGYDAPKTKKPPSRTCNCWPKWCICCCCFGDRKSKKKTTKPKTEKKKRSFFKRAENQSPAYALGEIEEGAPGAENEKAGIVNQQKLEKKFGQSSVFVASTLLENGGTLKSASPASLLKEAIHVISCGYEDKTDWGKEIGWIYGSVTEDILTGFKMHCHGWRSIYCIPKLPAFKGSAPLNLSDRLHQVLRWALGSVEIFFSNHCPLWYGYGGGLKCLERFSYINSIVYPFTSIPLLAYCTLPAICLLTGKFITPELTNVASLWFMSLFICIFATGILEMRWSGVGIDDWWRNEQFWVIGGVSSHLFALFQGLLKVIAGIDTSFTVTSKGGDDEEFSELYTFKWTTLLIPPTTLLLLNFIGVVAGVSNAINNGYESWGPLFGKLFFAFWVIVHLYPFLKGLVGRQNRTPTIVIVWSILLASIFSLLWVRIDPFLAKNDGPLLEECGLDCN

SEQ ID NO: 60 - protein, 1115 aa, Oryza sativa
MSTGPGKKAIRNAGGVGGGAGPSAGGPRGPAGQAVKFARRTSSGRYVSLSREDIDMEGELAADYTNYTVQIPPTPDNQPMLNGAEPASVAMKAEEQYVSNSLFTGGFNSATRAHLMDKVIESSVSHPQMAGAKGSRCAMPACDGSAMRNERGEDVDPCECHFKICRDCYLDAQKDGCICPGCKEHYKIGEYADDDPHDGKLHLPGPGGGGNKSLLARNQNGEFDHNRWLFESSGTYGYGNAFWPKGGMYDDDLDDDVDKLGGDGGGGGGGGPLPEQKPFKPLTRKIPMPTSVISPYRIFIVIRMFVLLFYLTWRIRNPNMEALWLWGMSIVCELWFAFSWLLDMLPKVNPVNRSTDLAVLKEKFETPSPSNPHGRSDLPGLDVFVSTADPEKEPVLTTATTILSILAVDYPVEKLACYVSDDGGALLTFEAMAEAASFANVWVPFCKKHDIEPRNPDSYFSVKGDPTKGKRRNDFVKDRRRVKREFDEFKVRINGLPDSIRRRSDAFNAREDMKMLKHLRETGADPSEQPKVKKATWMADGSHWPGTWAASAPDHAKGNHAGILQVMLKPPSPDPLYGMHDDDQMIDFSDVDIRLPMLVYMSREKRPGYDHNKKAGAMNALVRCSAVMSNGPFMLNFDCDHYINNAQAVREAMCFFMDRGGERIAYIQFPQRFEGIDPSDRYANNNTVFFDGNMRALDGLQGPMYVGTGCMFRRFAVYGFDPPRTAEYTGWLFTKKKVTTFKDPESDTQTLKAEDFDAELTSHLVPRRFGNSSPFMASIPVAEFQARPLADHPAVLHGRPSGALTVPRPPLDPPTVAEAVSVISCWYEDKTEWGDRVGWIYGSVTEDVVTGYRMHNRGWRSVYCITKRDAFLGTAPINLTDRLHQVLRWATGSVEIFFSRNNAFLASRKLMLLQRISYLNVGIYPFTSIFLLVYCFIPALSLFSGFFIVQKLDIAFLCYLLTMTITLVALGILEGLLKVMAGIEISFTLTAKAAADDNEDIYADLYIVKWSSLLIPPITIGMVNIIAIAFAFARTIYSDNPRWGKFIGGGFFSFWVLAHLNPFAKGLMGRRGKTPTIVFVWSGLLSITVSLLWVAISPPEANSNGGARGGGFQFP

SEQ ID NO: 61 - protein, 1055 aa, Oryza sativa
MEASAGLVAGSHNRNELVLIRGHEEPKPLRALSGQVCEICGDEVGRTVDGDLFVACNECGFPVCRPCYEYERREGTQNCPQCKTRYKRLKGSPRVPGDEDEEDIDDLEHEFNIDDEKQKQLQQDQDGMQNSHITEAMLHGKMSYGRGPDDGDGNSTPLPPIITGARSVPVSGEFPISNSHGHGEFSSSLHKRIHPYPVSEPGSAKWDEKKEVSWKERMDDWKSKQGIVAGGAPDPDDYDADVPLNDEARQPLSRKVSIASSKVNPYRMVIILRLVVLGFFLRYRILHPVPDAIPLWLTSIICEIWFAVSWILDQFPKWYPIDRETYLDRLSLRYEREGEPSLLSAVDLFVSTVDPLKEPPLVTANTVLSILAVDYPVDKVSCYVSDDGASMLTFESLSETAEFARKWVPFCKKFSIEPRAPEFYFSQKVDYLKDKVHPNFVQERRAMKREYEEFKVRINALVAKAQKVPAEGWIMKDGTPWPGNNTRDHPGMIQVFLGHSGGHDTEGNELPRLVYVSREKRPGFQHHKKAGAMNALIRVSAVLTNAPFMLNLDCDHYINNSKAIREAMCFLMDPQVGRKVCYVQFPQRFDGIDVHDRYANRNTVFFDINMKGLDGIQGPVYVGTGCVFRRQALYGYNPPKGPKRPKMVTCDCCPCFGRKKRKHGKDGLPEAVAADGGMDSDKEMLMSQMNFEKRFGQSAAFVTSTLMEEGGVPPSSSPAALLKEAIHVISCGYEDKTDWGLELGWIYGSITEDILTGFKMHCRGWRSVYCMPKRAAFKGSAPINLSDRLNQVLRWALGSVEIFFSRHSPLLYGYKNGNLKWLERFSYINTTIYPFTSLPLLAYCTLPAVCLLTGKFIMPPISTFASLFFIALFISIFATGILEMRWSGVSIEEWWRNEQFWVIGGVSAHLFAVVQGLLKVLAGIDTNFTVTSKATGDEDDEFAELYAFKWTTLLIPPTTLLILNIIGVVAGVSDAINNGSEAWGPLFGKLFFAFWVIVHLYPFLKGLMGRQNRTPTIVVIWSVLLASIFSLLWVRIDPFTIKARGPDVRQCGINC

SEQ ID NO: 62 - protein, 1063 aa, Oryza sativa
MDTASVTGGEHKGKEKTCRVCGEEVAAREDGKPFVACAECGFPVCKPCYEYERSEGTQCCPQCNTRYKRHKGCPRVEGDEDDGGDMDDFEEEFQIKSPTKQKPPHEPVNFDVYSENGEQPAQKWRPGGPALSSFTGSVAGKDLEQEREMEGGMEWKDRIDKWKTKQEKRGKLNRDDSDDDDDKNDDEYMLLAEARQPLWRKVPIPSSKINPYRIVIVLRLVVLCFFLKFRITTPAMDAVPLWLASVICELWFALSWILDQLPKWSPVTRETYLDRLALRYERDGEPCRLAPIDFFVSTVDPLKEPPIITANTVLSILAVDYPVDRVSCYVSDDGASMLLFDTLSETAEFARRWVPFCKKFTIEPRAPEFYFSQKIDYLKDKVQPTFVKERRAMKREYEEFKVRINALVAKAQKKPEEGWVMQDGTPWPGNNTRDHPGMIQVYLGSQGALDVEGSELPRLVYVSREKRPGYNHHKKAGAMNSLVRVSAVLTNAPFILNLDCDHYVNNSKAVREAMCFLMDKQLGKKLCYVQFPQRFDGIDRHDRYANRNTVFFDINMKGLDGIQGPVYVGTGTVFNRQALYGYDPPRPEKRPKMTCDCWPSWCCCCCCFGGGKRGKSHKNKKGGGGGEGGGLDEPRRGLLGFYKKRSKKDKLGGGAASLAGGKKGYRKHQRGFELEEIEEGLEGYDELERSSLMSQKSFEKRFGQSPVFIASTLVEDGGLPQGAAADPAALIKEAIHVISCGYEEKTEWGKEIGWIYGSVTEDILTGFKMHCRGWKSVYCTPARAAFKGSAPINLSDRLHQVLRWALGSVEIFMSRHCPLWYAYGGRLKWLERFAYTNTIVYPFTSIPLLAYCTIPAVCLLTGKFIIPTLNNLASIWFIALFLSIIATGVLELRWSGVSIEDWWRNEQFWVIGGVSAHLFAVFQGLLKVLGGVDTNFTVTSKAAADETDAFGELYLFKWTTLLVPPTTLIIINMVGIVAGVSDAVNNGYGSWGPLFGKLFFSFWVILHLYPFLKGLMGRQNRTPTIVVLWSILLASIFSLVWVRIDPFIPKPKGPVLKPCGVSC

SEQ ID NO: 63 - protein, 1127 aa, Oryza sativa
MASKGILKNGGKPPTAPSSAAPTVVFGRRTDSGRFISYSRDDLDSEISSVDFQDYHVHIPMTPDNQPMDPAAGDEQQYVSSSLFTGGFNSVTRAHVMEKQASSARATVSACMVQGCGSKIMRNGRGADILPCECDFKICVDCFTDAVKGGGGVCPGCKEPYKHAEWEEVVSASNHDAINRALSLPHGHGHGPKMERRLSLVKQNGGAPGEFDHNRWLFETKGTYGYGNAIWPEDDGVAGHPKELMSKPWRPLTRKLRIQAAVISPYRLLVLIRLVALGLFLMWRIKHQNEDAIWLWGMSIVCELWFALSWVLDQLPKLCPINRATDLSVLKDKFETPTPSNPTGKSDLPGIDIFVSTADPEKEPVLVTANTILSILAADYPVDKLACYVSDDGGALLTFEAMAEAASFANLWVPFCRKHEIEPRNPDSYFNLKRDPFKNKVKGDFVKDRRRVKREYDEFKVRVNGLPDAIRRRSDAYHAREEIQAMNLQREKMKAGGDEQQLEPIKIPKATWMADGTHWPGTWLQASPEHARGDHAGIIQVMLKPPSPSPSSSGGDMEKRVDLSGVDTRLPMLVYVSREKRPGYDHNKKAGAMNALVRASAIMSNGPFILNLDCDHYVYNSKAFREGMCFMMDRGGDRLCYVQFPQRFEGIDPSDRYANHNTVFFDVNMRALDGLQGPVYVGTGCLFRRIALYGFDPPRSKDHTTPWSCCLPRRRRTRSQPQPQEEEEETMALRMDMDGAMNMASFPKKFGNSSFLIDSIPVAEFQGRPLADHPSVKNGRPPGALTIPRETLDASIVAEAISVVSCWYEEKTEWGTRVGWIYGSVTEDVVTGYRMHNRGWKSVYCVTHRDAFRGTAPINLTDRLHQVLRWATGSVEIFFSRNNALFASSKMKVLQRIAYLNVGIYPFTSVFLIVYCFLPALSLFSGQFIVQTLNVTFLTYLLIITITLCLLAMLEIKWSGIALEEWWRNEQFWLIGGTSAHLAAVLQGLLKVIAGIEISFTLTSKQLGDDVDDEFAELYAVKWTSLMIPPLTIIMINLVAIAVGFSRTIYSTIPQWSKLLGGVFFSFWVLAHLYPFAKGLMGRRGRTPTIVYVWSGLVAITISLLWIAIKPPSAQANSQLGGSFSFP

SEQ ID NO: 64 - protein, 1215 aa, Oryza sative
MSRRLSLPAGAPVTVAVSPVRSPGGDAVVRRGSGLTSPVPRHSLGSSTATLQVSPVRRSGGSRYLGASRDGGADESAEFVHYTVHIPPTPDRATASVASEAEAAAEAEEVHRPQRSYISGTIFTGGLNCATRGHVLNFSGEGGATAASRAAASGNMSCKMRGCDMPAFLNGGRPPCDCGFMICKECYAECAAGNCPGCKEAFSAGSDTDESDSVTDDDDDEAVSSSEERDQLPLTSMARKFSVVHSMKVPGAAANGNGKPAEFDHARWLFETKGTYGYGNALWPKDGHAHSGAGFVAADEPPNFGARCRRPLTRKTSVSQAILSPYRLLIAIRLVALGFFLAWRIRHPNPEAVWLWAMSVACEVWFAFSWLLDSLPKLCPVHRAADLAVLAERFESPTARNPKGRSDLPGIDVFVTSADPEKEPPLVTANTILSILAADYPVEKLACYLSDDGGALLSFEALAETASFARTWVPFCRKHGVEPRCPEAYFGQKRDFLKNKVRVDFVRERRKVKREYDEFKVRVNSLPEAIRRRSDAYNAGEELRARRRQQEEAAAAAAAGNGELGAAAVETAAVKATWMSDGSHWPGTWTCPAADHARGDHAGIIQAMLAPPTSEPVMGGEAAECGGLIDTTGVDVRLPMLVYVSREKRPGYDHNKKAGAMNALVRTSAIMSNGPFILNLDCDHYVHNSSALREGMCFMLDRGGDRVCFVQFPQRFEGVDPSDRYANHNLVFFDVSMRAMDGLQGPMYVGTGCVFRRTALYGFSPPRATEHHGWLGRRKIKLFLTKKKSMGKKTDRAEDDTEMMLPPIEDDDGGADIEASAMLPKRFGGSATFVASIPVAEYQGRLLQDTPGCHHGRPAGALAVPREPLDAATVAEAIGVISCFYEEKTEWGRRIGWIYGSVTEDVVTGYRMHNRGWRSVYCVTPRRDAFRGTAPINLTDRLHQVLRWATGSVEIFFSRNNALFASPRMKLLQRVAYFNAGMYPFTSVFLLAYCLLPAVSLFSGKFIVQRLSATFLAFLLVITLTLCLLALLEIKWSGITLHEWWRNEQFWVIGGTSAHPAAVLQGLLKVIAGVDISFTLTSKPGNGGGDGGVGGEGNDDEAFAELYEVRWSYLMVPPVTIMMVNAVAIAVAAARTLYSEFPQWSKLLGGAFFSFWVLCHLYPFAKGLLGRRGRVPTIVFVWSGLISMIISLLWVYINPPAGARERIGGGGFSFP

SEQ ID NO: 65 - protein, 1082 aa, Brassica napus
MNTGGRLVAGSHNRNEFVLINADESARIRSVQELSGQTCKICRDEIELTVDGEPFVACNECAFPVCRPCYEYERREGNQACPQCKTRYKRIKGSPRVENDEEEDDIDDLDNEFEYENGGVGFDQVSEGMSVSRRHSGFPQSDLDSAPPGSQIPLLTYGDEDIEISSDRHALIVPPSIGGHSNKSHPASLSDPTIAAHPRPMVPQKDLAVYGYGSVAWKDRMEDWKKKQNEKLQVVRHEGDPDFEDGDDIPMMDEGRQPLSRKIPIKSSKINPYRMLIVLRLVILGLFFHYRILHPVKDAYALWLISVICEIWFAVSWVLDQFPKWYPIERETYLDRLSLRYEKEGKPSELSAVDVFVSTVDPLKEPPLITANTVLSILAVDYPVDRVACYVSDDGAAMLTFEALSETAEFARKWVPFCKKYCIEPRAPEWYFCHKMDYLKNKVHPAFVRERRAMKRDYEEFKVKINALVATAQKVPEEGWTMQDGTPWPGNSVRDHPGMIQVFLGSDGVRDVENNELPRLVYVSREKRPGFDHHKKAGAMNSLIRVSGVLSNAPYLLNVDCDHYINNSKALREAMCFMMDPQSGKKICYVQFPQRFDGIDRHDRYSNRNVVFFDINMKGLDGLQGPIYVGTGCVFRRQALYGFDAPKKKKAPRKTCNCWPKWCFMCCGSRKNRQAKKVAADKKKKNREASKQIHALENIEEGSVTKGSNVEQSTEAMQLKLEKKFGQSPVFVASARMQNGGMARNASPACLLKEAIQVISCGYEDKTEWGKEIGWIYGSVTEDILTGFKMHSHGWRSVYCTPKLPAFKGSAPINLSDRLHQVLRWALGSVEIFLSRHCPIWYGYGGGLKWLERLSYINSVVYPWTSLPLIVYCSLPAICLLTGKFIVPEISNYASILFMALFSSIAITGILEMQWGKVGIDDWWRNEQFWVIGGVSAHLFALFQGLLKVLAGVDTNFTVTSKAADDGEFSDLYLFKWTSLLIPPTTLLIINMIGIVVGISDAISNGYDSWGPLFGRLFFALWVVIHLYPFLKGLLGKQDRMPTIIIVWSILIASILTLLWVRVNPFVAKGGPVLEICGLDCL

SEQ ID NO: 66 - protein, 1066 aa, Brassica napus
MESEGETAGKPMTSVGGQICQICSDNVGKTVDGDRFVACDVCGFPVCRPCYEFERKDGNQSCPQCKTTYKRHKGSPAIPGDKDEDVFADEATVELSYPQKEKISERMLGWHLTRGKGEEMGQPEYDKEVSHNHLPRLTSRQETSGEFSAASPERLSVSSTIGGGKRLPYSSDINQSPHRRISDPVGLGNVAWKERVDGWKMKQEKNNGGPVSTQAASERGGGDIDASTDILADEALLNDEARQPLSRKVSIPSSRINPYRMVIMLRLVILCLFLHYRITNPVPNAFTLWLISVICEIWFAFSWILDQFPKWFPVNRETYLDRLALRYDREGEPSQLAAVDIFVSTVDPLKEPPLVTANTVLSILAVDYPVDKVSCYVSDDGAAMLSFEALAETSEFARKWVPFCKKYSIEPRAPEWYFAAKIDYLKDKVQTSFVKDRRAMKREYEEFKIRINALVSKALKCPEEGWVMQDGTPWPGNNTRDHPGMIQVFLGQNGGLDAEGNELPRLVYVSREKRPGFQHHKKAGAMNALVRVSAVLTNGPFILNLDCDHYINNSKALREAMCFLMDPNLGKQVCYVQFPQRFDGIDKNDRYANRNTVFFDINLRGLDGIQGPVYVGTGCVFNRTALYGYEPPIKVKHKKPSLLSKICGGSRKKNSKSKKDSDKKKSGRHTDSTVPVFNLDDIEEGVEGAGFDDEKALLMSQMSLEKRFGQSAVFVASTLMENGGVPPTETPENLLKEAIHVISCGYEDKSDWGMEIGWIYGSVTEDILTGFKMHARGWRSIYCMPKLPAFKGSAPINLSDRLNQVLRWALGSVEILFSRHCPIWYGYSGRLKFLERFAYVNTTIYPLTSVPLLLYCTLPAVCLFTNQFIIPQISNIASIWFLSLFLSIFATGILEMRWSGVGIDEWWRNEQFWVIGGVSAHLFAVFQGLLKVLAGIDTNFTVTSKASDEDGDFAELYLFKWTTLLIPPTTLLIVNLVGVVAGFSYAINSGYQSWGPLFGKLFFAFWVIVHLYPFLKGLMGRQNRTPTIVVVWSVLLASIFSLLWVRIDPFTKRVTGPDILECGINC

SEQ ID NO: 67 - protein, 1084 aa, Brassica napus
MNTGGRLIAGSHNRNEFVLINADESARIRSVQELRGQTCEICRDEVELTVDGEPFVACNECAFPVCRPCYEYERREGNQACPQCKTRYKRLKGSPRVENDEEEDDIDDIDNEFDYMNNGGIGFDQVSEGMSVSRRHSGFPQSDLDSAPPGSQIPLLTYGDEDIEISSDRHALIVPPSLSGHSHRGHPASLSDPTIAAHPRPMVPQKDLAVYGYGSVAWKDRMEEWKRKQNEKLQVVKHEGDPDFEDGDDIPMMDEGRQPLSRKIPIKSSKINPYRMLIVLRLVILGLFFHYRILHPVKDAYALWLISVICEIWFAVSWVLDQFPKWYPIERETYLDRLSLRYEKEGKPSELSAVDVFVSTVDPLKEPPLITANTVLSILAVDYPVDRVACYVSDDGAAMLTFEALSETAEFARKWVPFCKKYCIEPRAPEWYFCHKMDYLKNKVHPAFVRERRAMKRDYEEFKVKINALVATAQKVPEEGWTMQDGTPWPGNSTRDHPGMIQVFLGSDGVRDVENNELPRLVYVSREKRPGFDHHKKAGAMNSLIRVSGVLSNAPYLLNVDCDHYINNSKALREAMCFMMDPQSGKKICYVQFPQRFDGIDRHDRYSNRNVVFFDINMKGLDGLQGPIYVGTGCVFRRQALYGFDAPKKKKAPRKTCNCWPKWCFLCCGSRKNRKAKTAAADKKKKNREASKQIHALENIEEGRVTTKGSNVELSTEAMQLKLEKKFGQSPVFVASARMENGGMARNASPACLLKEAIQVISCGYEDKTEWGKEIGWIYGSVTEDILTGFKMHSHGWRSVYCTPKLPAFKGSAPINLSDRLHQVLRWALGSVEIFLSRHCPIWYGYGGGLKWLERLSYINSVVYPWTSLPLIVYCSLPAICLLTGKFIVPEISNYASILFMALFSSIAVTGILEMQWGKVGIDDWWRNEQFWVIGGVSAHLFALFQGLLKVLAGVDTNFTVTSKAADDGEFSDLYLFKWTSLLIPPTTLLIINVIGIVVGISDAISNGYDSWGPLFGRLFFALWVVIHLYPFLKGLLGKQDRMPTIIVVWSILLASILTLLWVRVNPFVAKGGPILEICGLDCL

SEQ ID NO: 68 - protein, 1079 aa, Brassica napus
MNTGGRLIAGSHNRNEFVLINADENARIRSVQELRGQTCEICRDEIESTVDGEPFVACNECAFPVCRPCYEYERREGNQACPQCKTRYKRIKGSPRVENDEEEDDVDDIDNEFEYGGNGIGFDQVSEGVSVSRRHSGDLDSAPPGSQIPLLTYGDEDIEISSDRHALIVPPSLSGHGSRVHPVSLSDPTIAAHPRPMVPQKDLAVYGYGSVAWKDRMEEWKRKQNEKLQVVRHEGDPDFEDGDDIPMMDEGRQPLSRKIPIKSSKINPYRMLIVLRLVILSLFFHYRILHPVKDAYALWLTSVICEIWFAVSWVLDQFPKWYPIERETYLDRLSLRYEKEGKPSELSPVDVFVSTVDPLKEPPLITANTVLSILAVDYPVDKVACYVSDDGAAMLTFEALSETAEFARKWVPFCKKYCIEPRAPEWYFCHKMDYLKNKVHPAFVRERRAMKRDYEEFKVKINALVATAQKVPEEGWTMQDGTPWPGNSTRDHPGMIQVFLGTDGVRDVENNELPRLVYVSREKRPGFDHHKKAGAMNSLIRVSGVLSNAPYLLNVDCDHYINNSKALREAMCFMMDPQSGKKICYVQFPQRFDGIDRHDRYSNRNVVFFDINMKGLDGLQGPIYVGTGCVFRRQALYGFDAPKKKKAPRKTCNCWPKWCFLCCGSRKNRKAKTLAAADKKKKNREASKQIHALENIEEGPVTKGSNVELSSEAMQLKLEKKFGQSPVFVASARMQNGGMARNASPACLLKEAIQVISCGYEDKTEWGKEIGWIYGSVTEDILTGFKMHSHGWRSVYCTPKLPAFKGSAPINLSDRLHQVLRWALGSVEIFLSRHCPIWYGYGGGLKWLERLSYINSVVYPWTSLPLIVYCSLPAICLLTGKFIVPEISNYASILFMALFSSIAVTGILEMQWGKVGIDDWWRNEQFWVIGGVSAHLFALFQGLLKVLAGVDTNFTVTSKAADDGEFSDLYLFKWTSLLIPPTTLLIINVIGIVVGISDAISNGYDSWGPLFGRLFFALWVVIHLYPFLKGLLGKQDRMPTIIVVWSILLASILTLLWVRVNPFVAKGGPVLEICGLDCL

SEQ ID NO: 69 - protein, 1083 aa, Brassica napus
MEASAGLVAGSYRRNELVRIRHESDGGSKAMKNMDPHTCQICGDNAGLTETGDLFVACNECAFPVCRPCYEYERKDGTQCCPQCKTRYRRLRGHPRVEGDEDEDDVDDIENEFNYAQGANKGRRQQRHGEEFSSSSRHESQPIPLLTHGHTVSGEIRTPDTQSVRTTSGPLGPGDRNAISSPYIDPRQPVPVRIVDPSKDLNSYGLGNVDWKERVEGWKLKQEKNMVQMTGKYHEGKGGEIEGTGSNGEELQMADDSRLPMSRIVPIPPSHLTPYRVVIILRLIILGFFLQYRTTHPVKDAYPLWLTSVICEIWFAFSWLLDQFPKWYPINRETYLDRLAIRYDRDGEPSQLTPVDVFVSTVDPLKEPPLVTANTVLSILAVDYPVDKVACYVSDDGAAMLTFESLSETAEFAKKWVPFCKKFSIEPRAPEFYFAQKIDYLKDKIQPSFVKERRAMKREYEEFKVRINALVAKAQKIPEEGWTMQDGTPWPGNNTRDHPGMIQVFLGHSGGLDTDGNELPRLIYVSREKRPGFQHHKKAGAMNALIRVSAVLTNGAYLLNVDCDHYFNNSKAIKEAMCFLMDPAYGKKCCYVQFPQRFDGIDLHDRYANRNIVFFDINLKGLDGIQGPVYVGTGCCFNRQALYGYDPVLTEEDLEPNIIVKSCCGSRKKGKKSKKYNYDQQRRGINRSDSNAPLFNMDDIEEGFEGYDDERSILMSQKSVEKRFGQSPVFIAATFMEQGGIPPTTNPATLLKEAIHVISCGYEDKTEWGKEIGWIYGSVTEDILTGFKMHARGWMSIYCNPPRPAFKGSAPINLSDRLNQVLRWALGSIEILLSRHCPIWYGYTGRLRLLERLAYINTIVYPITALPLIAYCILPAFCLITDKFIIPEISNYASIWFILLFISIAVTGVLELRWSGVSIEDWWRNEQFWVIGGTSAHLFAVFQGLLKVLAGIDTNFTVTSKASDEDGDFAELYIFKWTALLIPPTTVLVVNLIGIVAGVSYAVNSGYQSWGPLFGKLFFALWVIAHLYPFLKGLMGRQNRTPTIVIVWSVLLASIFSLLWVRINPFVSVTPEANPTAVPGGVF

SEQ ID NO: 70 - protein, 1066 aa, Brassica napus
MESDGETAGKPMTSVGGQICQICSDSVGKTVDGDRFVACDICGFPVCRPCYEYERKHGNQSCPQCKTTYKRHKGSPAIPGDKDEDVFADEATVELNYPQKEKISERMLGWHLTRGKSEEMGQPEYDKEVSHNHLPRLTSRQDTSGEFSAASPERLSVSSTIAGGKRLPYSCDINQSPNRRISDPVGLGNVAWKERVDGWKMKQEKNTGGPVSTQAASERGGGDIDASTDILADEALLNDEARQPLSRKVSIPSSRINPYRMVIMLRLVILCLFLHYRITNPVPNAFTLWLISVICEIWFAFSWILDQFPKWFPVNRETYLDRLALRYDREGEPSQLAAVDIFVSTVDPLKEPPLVTANTVLSILAVDYPVDKVSCYVSDDGAAMLSFEALAETSEFARKWVPFCKKYSIEPRAPEWYFAAKIDYLKDKVQTSFVKDRRAMKREYEEFKIRINALVSKALKCPEEGWVMQDGTPWPGNNTRDHPGMIQVFLGQNGGLDAEGNELPRLVYVSREKRPGFQHHKKAGAMNALVRVSAVLTNGPFILNLDCDHYINNSKALREAMCFLMDPNLGKQVCYVQFPQRFDGIDKNDRYANRNTVFFDINLRGLDGIQGPVYVGTGCVFNRTALYGYEPPIKVKHKKPSLLSKLCGGSRKKNSKSKKDSDKKKSGRHTDSTVPVFNLDDIEEGVEGAGFDDEKALLMSQMSLEKRFGQSAVFVASTLMENGGVPPTETPENLLKEAIHVISCGYEDKSDWGMEIGWIYGSVTEDILTGFKMHARGWRSIYCMPKLPAFKGSAPINLSDRLNQVLRWALGSVEILFSRHCPIWYGYSGRLKFLERFAYVNTTIYPLTSVPLLLYCTLPAVCLFTNQFIIPQISNIASIWFLSLFLSIFATGILEMRWSGVGIDEWWRNEQFWVIGGVSAHLFAVFQGLLKVLAGIDTNFTVTSKASDEDGDFAELYLFKWTTLLIPPTTLLIVNLVGVVAGFSYAINSGYQSWGPLFGKLFFAFWVIVHLYPFLKGLMGRQNRTPTIVVVWSVLLASIFSLLWVRIDPFTKRVTGPDILECGINC

SEQ ID NO: 71 - protein, 1082 aa, Brassica napus
MNTGGRLVAGSHNRNEFVLINADESARIRSVQELSGQTCKICRDEIELTVDGEPFVACNECAFPVCRPCYEYERREGNQACPQCKTRYKRIKGSPRVENDEEEDDIDDLDNEFEYENGGVGFDQVSEGMSVSRRHSGFPQSDLDSAPPGSQIPLLTYGDEDIEISSDRHALIVPPSIGGHSNKSHPASLSDPTIAAHPRPMVPQKDLAVYGYGSVAWKDRMEDWKKKQNEKLQVVRHEGDPDFEDGDDIPMMDEGRQPLSRKIPIKSSKINPYRMLIVLRLVILGLFFHYRILHPVKDAYALWLISVICEIWFAVSWVLDQFPKWYPIERETYLDRLSLRYEKEGKPSELSAVDVFVSTVDPLKEPPLITANTVLSILAVDYPVDRVACYVSDDGAAMLTFEALSETAEFARKWVPFCKKYCIEPRAPEWYFCHKMDYLKNKVHPAFVRERRAMKRDYEEFKVKINALVATAQKVPEEGWTMQDGTPWPGNSVRDHPGMIQVFLGSDGVRDVENNELPRLVYVSREKRPGFDHHKKAGAMNSLIRVSGVLSNAPYLLNVDCDHYINNSKALREAMCFMMDPQSGKKICYVQFPQRFDGIDRHDRYSNRNVVFFDINMKGLDGLQGPIYVGTGCVFRRQALYGFDAPKKKKAPRKTCNCWPKWCFMCCGSRKNRQAKKVAADKKKKNREASKQIHALENIEEGSVTKGSNVEQSTEAMQLKLEKKFGQSPVFVASARMQNGGMARNASPACLLKEAIQVISCGYEDKTEWGKEIGWIYGSVTEDILTGFKMHSHGWRSVYCTPKLPAFKGSAPINLSDRLHQVLRWALGSVEIFLSRHCPIWYGYGGGLKWLERLSYINSVVYPWTSLPLIVYCSLPAICLLTGKFIVPEISNYASILFMALFSSIAITGILEMQWGKVGIDDWWRNEQFWVIGGVSAHLFALFQGLLKVLAGVDTNFTVTSKAADDGEFSDLYLFKWTSLLIPPTTLLIINVIGIVVGISDAISNGYDSWGPLFGRLFFALWVVIHLYPFLKGLLGKQDRMPTIIVVWSILLASILTLLWVRVNPFVAKGGPVLEICGLDCL

SEQ ID NO: 72 - protein, 1079 aa, Brassica napus
MNTGGRLIAGSHNRNEFVLINADENARIRSVQELRGQTCEICRDEIESTVEGEPFVACNECAFPVCRPCYEYERREGNQACPQCKTRYKRIKGSPRVENDEEEDDVDDIDNEFEYGGNGIGFDQVSEGVSVSRRHSGDLDSAPPGSQIPLLTYGDEDIEISSDRHALIVPPSLSGHGSKVHPVSLSDPTIAAHPRPMVPQKDLAVYGYGSVAWKDRMEEWKRKQNEKLQVVRHEGDPDFEDGDDIPMMDEGRQPLSRKIPIKSSKINPYRMLIVLRLVILSLFFHYRILHPVKDAYALWLTSVICEIWFAVSWVLDQFPKWYPIERETYLDRLSLRYEKEGKPSELSPVDVFVSTVDPLKEPPLITANTVLSILAVDYPVDKVACYVSDDGAAMLTFEALSETAEFARKWVPFCKKYCIEPRAPEWYFCHKMDYLKNKVHPAFVRERRAMKRDYEEFKVKINALVATAQKVPEEGWTMQDGTPWPGNSTRDHPGMIQVFLGSDGVRDVENNELPRLVYVSREKRPGFDHHKKAGAMNSLIRVSGVLSNAPYLLNVDCDHYINNSKALREAMCFMMDPQSGKKICYVQFPQRFDGIDRHDRYSNRNVVFFDINMKGLDGLQGPIYVGTGCVFRRQALYGFDAPKKKKAPRKTCNCWPKWCFLCCGSRKNRKAKTLAAADKKKKNREASKQIHALENIEEGPVSKGSNVELSSEVMQLKLEKKFGQSPVFVASARMQNGGMARNASPACLLKEAIQVISCGYEDKTEWGKEIGWIYGSVTEDILTGFKMHSHGWRSVYCTPKLPAFKGSAPINLSDRLHQVLRWALGSVEIFLSRHCPIWYGYGGGLKWLERLSYINSVVYPWTSLPLIVYCSLPAICLLTGKFIVPEISNYASILFMALFSSIAVTGILEMQWGKVGIDDWWRNEQFWVIGGVSAHLFALFQGLLKVLAGVDTNFTVTSKAADDGEFSDLYLFKWTSLLIPPTTLLIINVIGIVVGISDAISNGYDSWGPLFGRLFFALWVVIHLYPFLKGLLGKQDRMPTIIVVWSILLASILTLLWVRVNPFVAKGGPVLEICGLDCL

SEQ ID NO: 73 - protein, 1083 aa, Brassica napus
MEASAGLVAGSYRRNELVRIRHESDGGTKALKNMDPHTCQICGDNAGLTETGDLFVACNECAFPVCRPCYEYERKDGTQCCPQCKTRYRRLRGSPRVEGDEDEDDVDDIENEFNYTQGANKGRRQQRHGEEFSSSSRHESQPIPLLTHGHTVSGEIRTPDTQSVRTTSGPLGPGDRNAISSPYIDPRQPVPVRIVDPSKDLNSYGLGNVDWKERVEGWKLKQEKNMVQMTGKYHEGKGGEIEGTGSNGEELQMADDTRLPMSRIVPIPPSHLTPYRVVIILRLIILGFFLQYRTTHPVKDAYPLWLTSVICEIWFAFSWLLDQFPKWYPINRETYLDRLAIRYDRDGEPSQLTPVDVFVSTVDPLKEPPLVTANTVLSILAVDYPVDKVACYVSDDGAAMLTFESLSETAEFAKKWVPFCKKFSIEPRAPEFYFAQKIDYLKDKIQPSFVKERRAMKREYEEFKVRINALVAKAQKIPEEGWTMQDGTPWPGNNTRDHPGMIQVFLGHSGGLDTDGNELPRLIYVSREKRPGFQHHKKAGAMNALIRVSAVLTNGAYLLNVDCDHYFNNSKAIKEAMCFLMDPAYGKKCCYVQFPQRFDGIDLHDRYANRNIVFFDINLKGLDGIQGPVYVGTGCCFNRQALYGYDPVLTEEDLEPNIIVKSCCGSRKKGKKSKKYNYDQQRRGINRSDSNAPLFNMDDIEEGFEGYDDERSILMSQKSVEKRFGQSPVFIAATFMEQGGIPPTTNPATLLKEAIHVISCGYEDKTEWGKEIGWIYGSVTEDILTGFKMHARGWMSIYCNPPRPAFKGSAPINLSDRLNQVLRWALGSIEILLSRHCPIWYGYTGRLRLLERLAYINTIVYPITALPLIAYCILPAFCLITDKFIIPEISNYASIWFILLFISIAVTGVLELRWSGVSIEDWWRNEQFWVIGGTSAHLFAVFQGLLKVLAGIDTNFTVTSKASDEDGDFAELYIFKWTALLIPPTTVLVVNLIGIVAGVSYAVNSGYQSWGPLFGKLFFALWVIAHLYPFLKGLMGRQNRTPTIVIVWSVLLASIFSLLWVRINPFVSVTPQANPTAVPGGVF

SEQ ID NO: 74 - protein, 1066 aa, Brassica napus
MESDGETAGKPMTSVGGQICQICSDNVGKTVDGDRFVACDICGFPVCRPCYEYERKHGNQSCPQCKTTYKRHKGSPAIPGDKDEDVFADEATVELNYPQKEKISERMLGWHLTRGKSEEMGQPEYDKEVSHNHLPRLTSRQDTSGEFSAASPERLSVSSTIAGGKRLPYSSDINQSPNRRISDPVGLGNVAWKERVDGWKMKQEKNNGGPVSTQAASERGGGDIDASTDILADEALLNDEARQPLSRKVSIPSSRINPYRMVIMLRLVILCLFLHYRITNPVPNAFTLWLISVICEIWFAFSWILDQFPKWFPVNRETYLDRLALRYDREGEPSQLAAVDIFVSTVDPLKEPPLVTANTVLSILAVDYPVDKVSCYVSDDGAAMLSFEALAETSEFARKWVPFCKKYSIEPRAPEWYFAAKIDYLKDKVQTSFVKDRRAMKREYEEFKIRINALVSKALKCPEEGWVMQDGTPWPGNNTRDHPGMIQVFLGQNGGLDAEGNELPRLVYVSREKRPGFQHHKKAGAMNALVRVSAVLTNGPFILNLDCDHYINNSKALREAMCFLMDPNLGKQVCYVQFPQRFDGIDKNDRYANRNTVFFDINLRGLDGIQGPVYVGTGCVFNRTALYGYEPPIKVKHKKPSLLSKLCGGSRKKNSKSKKDSDKKKSGRHTDSTVPVFNLDDIEEGVEGAGFDDEKALLMSQMSLEKRFGQSAVFVASTLMENGGVPPTETPENLLKEAIHVISCGYEDKSDWGMEIGWIYGSVTEDILTGFKMHARGWRSIYCMPKLPAFKGSAPINLSDRLNQVLRWALGSVEILFSRHCPIWYGYSGRLKFLERFAYVNTTIYPLTSVPLLFYCTLPAVCLFTNQFIIPQISNIASIWFLSLFLSIFATGILEMRWSGVGIDEWWRNEQFWVIGGVSAHLFAVFQGLLKVLAGIDTNFTVTSKASDEDGDFAELYLFKWTTLLIPPTTLLIVNLVGVVAGFSYAINSGYQSWGPLFGKLFFAFWVIVHLYPFLKGLMGRQNRTPTIVVVWSVLLASIFSLLWVRIDPFTKRVTGPDILECGINC

SEQ ID NO: 75 - protein, 1080 aa, Brassica napus
MEASSGLVAGSYRRNELVRIRHESDGGSKPLKNMDREICQICGDHAGLTETGDLFVACNECAFPVCRPCYDYERKDGTQCCPHCKTRYRRLRGHPRVEGDEDEDDVDDIENEFSYAQGGANKPRRREEFSSSSRHDSQPIPLLTHGHGVSGEIRTPDTQSVRTTSGPLGPGERNAISSSYIDPRQPVPVRIVDPSKDLNSYGLGNVDWKERVEGWKLKQEKNMLQMTGKYHEGKGGEIEGTGSNGEELQMADDTRLPMSRIVPIPPSHLTPYRVVIILRLIILGFFLQYRTTHPVKDAYPLWLTSVICEIWFAFSWLLDQFPKWYPINRETYLDRLAIRYDREGEPSQLTPVDVFVSTVDPLKEPPLVTANTVLSILAVDYPVDKVACYVSDDGAAMLTFESLSETAEFAKKWVPFCKKFSIEPRAPEFYFQQKIDYLKDKIQPSFVKERRAMKREYEEFKVRINALVAKAQKIPEEGWTMQDGTPWPGNNTRDHPGMIQVFLGHSGGLDTDGNELPRLIYVSREKRPGFQHHKKAGAMNALIRVSAVLTNGAYLLNVDCDHYFNNSKAIKEAMCFLMDPAYGKKCCYVQFPQRFDGIDLHDRYANRNIVFFDINLKGLDGIQGPVYVGTGCCFNRQALYGYDPVLTEEDLKPNIIVKSCCGSRKKGKNSKKYSYDQKRRGISRSDSNAPLFNMDDIDEGFEGYDDDRSILMSQKSVEKRFGQSPVFIAATFMEQGGIPPTTNPATLLKEAIHVISCGYEDKTEWGKEIGWIYGSVTEDILTGFKMHARGWMSIYCNPPRPAFKGSAPINLSDRLNQVLRWALGSIEILLSRHCPIWYGYTGRLRLLERLAYINTIVYPITALPLIAYCILPAFCLITDKFIIPEISNYASIWFILLFISIAVTGILELRWSGVSIEDWWRNEQFWVIGGTSAHLFAVFQGLLKVLAGIDTNFTVTSKASDEDGDFAELYIFKWTALLIPPTTVLVVNMIGIVAGVSYAINSGYQSWGPLFGKLFFALWVIAHLYPFLKGLLGRQNRTPTIVIVWSVLLASIFSLLWVRINPFVSVTPAANPNAVPGGVF

SEQ ID NO: 76 - protein, 1080 aa, Brassica napus
MEASSGLVAGSYRRNELVRIRHESDGGSKPLKNMDREICQICGDHAGLTETGDLFVACNECAFPVCRPCYEYERKDGTQCCPHCKTRYRRLRGHPRVEGDEDEDDVDDIENEFSYAQGGANKPRRREEFSSSSRHDSQPIPLLTHGHGVSGEIRTPDTQSVRTTSGPLGPGDRNAISSPYIDPRQPVPVRIVDPSKDLNSYGLGNVDWKERVEGWKLKQEKNMLQMTGKYHEGKGGEIEGTGSNGEELQMADDSRLPMSRIVPIPPSHLTPYRVVIILRLIILGFFLQYRTTHPVKDAYPLWLTSVICEIWFAFSWLLDQFPKWYPINRETYLDRLAIRYDRDGEPSQLTPVDVFVSTVDPLKEPPLVTANTVLSILAVDYPVDKVACYVSDDGAAMLTFESLSETAEFAKKWVPFCKKFSIEPRAPEFYFAQKIDYLKDKIQPSFVKERRAMKREYEEFKVRINALVAKAQKVPEEGWTMQDGTPWPGNNTRDHPGMIQVFLGHSGGLDTDGNELPRLIYVSREKRPGFQHHKKAGAMNALIRVSAVLTNGAYLLNVDCDHYFNNSKAIKEAMCFLMDPAYGKKCCYVQFPQRFDGIDLHDRYANRNIVFFDINLKGLDGIQGPVYVGTGCCFNRQALYGYDPVLTEEDLQPNIIVKSCCGSRKKGKNSKKYSYDQKRRGISRSDSNAPLFNMDDIDEGFEGYDDDRSILMSQKRVEKRFGQSPVFIAATFMEQGGIPPTTNPATLLKEAIHVISCGYEDKTEWGKEIGWIYGSVTEDILTGFKMHARGWMSIYCNPPRPAFKGSAPINLSDRLNQVLRWALGSIEILLSRHCPIWYGYTGRLRLLERLAYINTIVYPITALPLIAYCILPAFCLITDKFIIPEISNYASIWFILLFISIAVTGILELRWSGVSIEDWWRNEQFWVIGGTSAHLFAVFQGLLKVLAGIDTNFTVTSKASDEDGDFAELYIFKWTALLIPPTTVLVVNLIGIVAGVSYAINSGYQSWGPLFGKLFFALWVIAHLYPFLKGLLGRQNRTPTIVIVWSVLLASIFSLLWVRINPFVSVIPAANPNAVPGGVF

SEQ ID NO: 77 - protein, 1066 aa, Brassica napus
MESEGETAGKPMTSVGGQICQICSDNVGKTVDGDWFVACDVCGFPVCRPCYDFERKDGNQSCPQCKTTYKRHKGSPAIPGDKDEDVFADEATVELSYPQKEKISERMLGWHLTRGKGEEMGQPEYDKEVSHNHLPRLTSRQETSGEFSAASPERLSVSSTIGGGKRLPYSSDINQSPHRRISDPVGLGNVAWKERVDGWKMKQEKNNGGPVSTQAASERGGGDIDASTDILADEALLNDEARQPLSRKVSIPSSRINPYRMVIMLRLVILCLFLHYRITNPVPNAFTLWLISVICEIWFAFSWILDQFPKWFPVNRETYLDRLALRYDREGEPSQLAAVDIFVSTVDPLKEPPLVTANTVLSILAVDYPVDKVSCYVSDDGAAMLSFEALAETSEFARKWVPFCKKYSIEPRAPEWYFAAKIDYLKDKVQTSFVKDRRAMKREYEEFKIRINALVSKALKCPEEGWVMQDGTPWPGNNTRDHPGMIQVFLGQNGGLDAEGNELPRLVYVSREKRPGFQHHKKAGAMNALVRVSAVLTNGPFILNLDCDHYINNSKALREAMCFLMDPNLGKQVCYVQFPQRFDGIDKNDRYANRNTVFFDINLRGLDGIQGPVYVGTGCVFNRTALYGYEPPIKVKHKKPSLLSKLCGGSRKKNSKSKKDSDKKKSGRHTDSTVPVFNLDDIEEGVEGAGFDDEKALLMSQMSLEKRFGQSAVFVASTLMENGGVPPTETPENLLKEAIHVISCGYEDKSDWGMEIGWIYGSVTEDILTGFKMHARGWRSIYCMPKLPAFKGSAPINLSDRLNQVLRWALGSVEILFSRHCPIWYGYSGRLKFLERFAYVNTTIYPLTSVPLLLYCTLPAVCLFTNQFIIPQISNIASIWFLSLFLSIFATGILEMRWSGVGIDEWWRNEQFWVIGGVSAHLFAVFQGLLKVLAGIDTNFTVTSKASDEDGDFAELYLFKWTTLLIPPTTLLIVNLVGVVAGFSYAINSGYQSWGPLFGKLFFAFWVIVHLYPFLKGLMGRQNRTPTIVVVWSVLLASIFSLLWVRIDPFTKRVTGPDILECGINC

SEQ ID NO: 78 - protein, 1084 aa, Brassica napus
MNTGGRLIAGSHNRNEFVLINADESARIRSVQELRGQTCEICRDEVELTVDGEPFVACNECAFPVCRPCYEYERREGNQACPQCKTRYKRLKGSPRVENDEEEDDIDDIDNEFDYMNNGGIGFDQVSEGMSVSRRHSGFPQSDLDSAPPGSQIPLLTYGDEDIEISSDRHALIVPPSLSGHSHRGHPASLSDPTIAAHPRPMVPQKDLAVYGYGSVAWKDRMEEWKRKQNEKLEVVKHEGDPDFEDGDDIPMMDEGRQPLSRKIPIKSSKINPYRMLIVLRLVILGLFFHYRILHPVKDAYALWLISVICEIWFAVSWVLDQFPKWYPIERETYLDRLSLRYEKEGKPSELSAVDVFVSTVDPLKEPPLITANTVLSILAVDYPVDRVACYVSDDGAAMLTFEALSETAEFARKWVPFCKKYCIEPRAPEWYFCHKMDYLKNKVHPAFVRERRAMKRDYEEFKVKINALVATAQKVPEEGWTMQDGTPWPGNSTRDHPGMIQVFLGSDGVRDVENNELPRLVYVSREKRPGFDHHKKAGAMNSLIRVSGVLSNAPYLLNVDCDHYINNSKALREAMCFMMDPQSGKKICYVQFPQRFDGIDRHDRYSNRNVVFFDINMKGLDGLQGPIYVGTGCVFRRQALYGFDAPKKKKAPRKTCNCWPKWCFLCCGSRKNRKAKTAAADKKKKNREASKQIHALENIEEGRVTTKGSNVELSTEAMQLKLEKKFGQSPVFVASARMENGGMARNASPACLLKEAIQVISCGYEDKTEWGKEIGWIYGSVTEDILTGFKMHSHGWRSVYCTPKLPAFKGSAPINLSDRLHQVLRWALGSVEIFLSRHCPIWYGYGGGLKWLERLSYINSVVYPWTSLPLIVYCSLPAICLLTGKFIVPEISNYASILFMALFSSIAVTGILEMQWGKVGIDDWWRNEQFWVIGGVSAHLFALFQGLLKVLAGVDTNFTVTSKAADDGEFSDLYLFKWTSLLIPPTTLLIINVIGIVVGISDAISNGYDSWGPLFGRLFFALWVVIHLYPFLKGLLGKQDRMPTIIVVWSILLASILTLLWVRVNPFVAKGGPILEICGLDCL

SEQ ID NO: 79 - protein, 1079 aa, Helianthus annum
MQANGGLVAGSHKRNELVRIRHDSDGGPKPLKDLNGQTCQICGDTVGLTETGDIFVACNECAFPVCRPCYEYERRDGNQACPQCKTRYRRHKGSPRVDGDEEEDDVDDLENEFSYPQGNNKAARQWQGDDANLSSSARHDPLPLLTNGQQVSGEIPSVRDNLSVRSTSGPLGPSDKQLPYIDPRQPVPVRIVDPTKDLNAYGLGNVDWKERVEGWKLKQEKNMQMTNRYGGEGKGGDEIERTGSNGEELQMADDARQPMSRVVPISSAHLTPYRIVIILRLIILGFFLQYRCSHPVNDAYPLWLVSVICEVWFALSWLLDQFPKWFPVERETYLDRLALRYDREGEPSQLAPIDVFVSTVDPLKEPPLITANTVLSILAVDYPVDKVSCYVSDDGSAMLTFESLSETAEFARKWVPFCKKHSIEPRAPEFYFAQKIDYLKDKIQPSFVKERRAMKREYEEFKVRINALVAKAQKMPEEGWTMQDGTPWPGNNPRDHPGMIQVFLGHSGGLDTDGNELPRLVYVSREKRPGFQHHKKAGAMNALIRVSAVLTNGAYLLNVDCDHYFNNSKALKEAMCFMMDPAYGKKTCYVQFPQRFDGIDLHDRYANRNIVFFDINLKGLDGIQGPVYVGTGCCFNRQALYGYDPVLTEADLEPNIIIKSCCGSRKKGKNSNKYTDKKRAVKRSESNIPIFNTEDMDEGVEGYDEEKSLLMSQRSLEKRFGQSSVFISATFMEMGGIPPTTNSATLLKEAIHVISCGYEDKTEWGKEIGWIYGSVTEDILTGFKMHARGWISIYCMPPRPAFKGSAPINLSDRLNQVLRWALGSIEILLSRHCPIWYGYNGKLKLLERLAYINTIVYPLTSIPLLAYCVLPAVCLLTGKFIIPEISNYASMWFILLFISIAATGILELRWSGVSIEDWWRNEQFWVIGGTSAHLFAVFQGLLKVLAGIDTNFTVTSKASDEDGDFAELYIFKWTALLIPPTTVLIVNLVGIVSGVSTAINSGYQSWGPLFGKLFFAIWVIVHLYPFLKGLLGRQNRTPTIVIVWSILLASIFSLLWVRIDPFTTDDKLDSIRGQCGIDC

SEQ ID NO: 80 - protein, 1081 aa, Helianthus annum
MESEGETGGTSMKNVGGQVCQICGDTVGTTAKGDPFVACDVCAFPVCRPCYEYERKDGNQSCPQCKTRYKRLKGSPAIPGDREEDIDGDDETTNFPFSSQTQNEKQKTAERMLNWHMTYGRGDDNSAPNYDKEVSHNHIPLLTGGHEVSGELSAASPQRLSVSSPPPGGERLTHSLPYSAYANQSPNIRVVDPVREFGSTGLGNLAWKERVDGWKMKQDKNVAPMTTSRAASERGQDIDASTDVLDDALLNDEARQPLSRKVSIPSSRINPYRMVIVLRLVILCIFLHYRITNPVTNAYPLWLLSVICEIWFAISWILDQFPKWLPVNRETYLDRLSLRYEREGEPSQLAAVDIFVSTVDPLKEPPLVTANTVLSILAVDYPVDKVSCYVSDDGAAMLSFESLSETSEFARKWVPFCKKYNIEPRAPEWYFAQKIDYLKDKIQPTFVKDRRAMKREYEEFKIRINGLVAKAQKVPDEGWIMQDGTPWPGNNTRDHPGMIQVFLGQNGGLDSEGNELPRLVYVSREKRPGFQHHKKAGAMNALVRVSAVLTNGPFLLNLDCDHYINNSKALREAMCFMMDPNLGKYVCYVQFPQRFDGIDRNDRYANRNTVFFDINLRGLDGIQGPVYVGTGCVFNRTALYGYEPPLKPKKKREKGFFSSCFGESRKKSSKSSKKGSDKKKSSKPVDPTVPVFSLEDIEEGVEGAGFDDEKSLLMSQMSLEKRFGQSAVFVASTLMENGGVPQSAAPETLLKEAIHVISCGYEDKTDWGNEIGWIYGSVTEDILTGFKMHARGWRSIYCMPPRPAFKGSAPINLSDRLNQVLRWALGSVEILFSRHCPIWYGYSGRLKWLERFAYINTTIYPITSIPLLVYCTLPAVCLLTGKFIIPQISNLASLWFISLFLSIFATGILEMRWSGVGIDEWWRNEQFWVIGGVSAHLFAVFQGLLKVLAGIDTNFTVTSKASDEDGDFAELYLFKWTTLLIPPTTLLIVNLVGVVAGISYAINSGYQSWGPLFGKLFFAFWVIVHLYPFLKGLMGKQNRTPTIVVVWSILLASIFSLLWVRIDPFTTKVTGPDVKFCGINC

SEQ ID NO: 81 - protein, 1040 aa, Helianthus annum
MQASAGLVAGSHNRNELVVIHGHEEPKPLKDMTGQVCEICGDEIGLTVDGDLFVACNECGFPVCRPCYEYERREGSQNCPQCKTRYKRLKGSPRVEGDDDEEDVDDIEHEFNIDDEHNKNNNIAEAMLHGKMSYGRGPEDDDNNNTQYPPVIAGRSAHVSDEFPISTQPHGEHLSSLHKRVHPYGSPEYGSGRWDDKKDGGWKERMEEWKMHQQGNLGAEIDDSVDPDMAMLDEARQPLSRKVPIASSKINPYRMVIVARLFILAIFLRYRLMNPVQDGFGLWLTSVICEIWFAFSWILDQFPKWFPIDRETYLDRLSLRYEREGEPNMLCPVDVFVSTVDPLKEPPLVTANTVLSILAMDYPVDKISCYISDDGASMLSFESLSETAEFARKWVPFCKKFAIEPRAPEMYFSDKIDYLKDKVQPTFVKERRAMKREYEEFKVRINALVAKAMKAPAEGWIMQDGTPWPGNNTKDHPGMIQVFLGQSGGTDVEGNELPRLVYVSREKRPGFQHHKKAGAMNALVRVSGVLTNAPFMLNLDCDHYLNNSKAAREAMCFLMDPQIGRKVCYVQFPQRFDGIDRHDRYANRNTVFFDINMKGLDGIQGPVYVGTGCVFRRQALYGYDPPKGPKRPKMVSCDCCPCFGRRKKNPKFEKHGDVENVQGYNDDDKELLKSQMNFEKKFGQSAIFVTSTLMVDGGVPPSSSPASLLKEAIHVISCGYEDKTEWGLELGWIYGSITEDILTGFKMHCRGWRSIYCMPKRPAFKGSAPINLSDRLNQVLRWALGSVEIFFSRHSPLLYGYKGGNLKWLERFAYVNTTIYPFTALPLLAYCILPAICLLTGKFIMPEISTLASLFFISLFLSIFATGILELRWSGVSIEEWWRNEQFWVIGGVSAHLFAVIQGLLKVLAGIDTNFTVTSKATDDEEFGELYAFKWTTLLIPPTTILIINMVGVVAGISDAINNGYQSWGPLFGKLFFAFWVILHLYPFLKGLMGKQNRTPTIVVIWSILLASIFSLLWVRIDPFVLKTKGPDVKQCGLNC

SEQ ID NO: 82 - protein, 736 aa, Helianthus annum
HALIIPPFMNRAKRVHPMPFSDTASSVSLPPRPMDPKKDLAVYGYGTVAWKDRMEEWRRRQNDKLQMVKHQGDGGGGQNDGDVDDPDMPKMDEGRQPLSRKLPISSSKINPYRMVILIRMAILGLFFHYRILHPVNDAYALWLISVICEIWFAVSWIFDQFPKWFPIERETYLDRLSLRYEKEGKPSELAPVDVFVSTVDPMKEPPLITANTVLSILAVDYPVDKVACYVSDDGAAMLTFEALSETSEFARKWVPFCKKFNIEPRAPEWYFAEKVDYLKDKVHPSFVRERRAMKREYEEFKIRINGLVTMAQKVPEEGWTMQDGTPWPGNDVRDHPGMIQVFLGQSGGLDSEGNELPRLVYVSREKRPGFQHHKKAGAMNALVRVSAVLNNGPFILNLDCDHYINNSKALREAMCFMMDPNLGKYVCYVQFPQRFDGIDRNDRYANRNTVFFDINLRGLDGIQGPVYVGTGCVFNRTALYGYEPPIKPKKKREKGVLSSCFGASRNKSSNSNKKGSDKKKSSRHDDPTVPVFSLEDIEEGVEGVGIDDEKSLLMSQMTLEKRFGQSAVFVASTLMENGGVPQSAAPETLLKEAIHVISCGYEDKTDWGSEIGWIYGSVTEDILTGFKMHARGWRSIYCMPPRAAFKGSAPINLSDRLNQVLRWALGSIEILFSRHCPIWYGYSGRLKWLERLACINTTIYPVTAIPLLVYCTLPAVCLLTGKFIIPQISNLASLWF

SEQ ID NO: 83 - protein, 509 aa, Helianthus annum
MLQGIISILIIRVHKIIEICICSTCFLGNNGVQDVEGNKLQRLVYVSREKRPGFDHHKKAGAMNALIRVSAVISNAPYMLNVDCDHYINNSKALREAMCFMMDPTSGKKICYVQFPQRFDGIDRHDRYSNRNVVFFDINMKGLDGIQGPIYVGTGCVFRRQALYGYDAPTKKKPPGKTCNCLPKWLLCCCSSRKKKAKGKSKKSKEKSTKGKKSKDPPTQIHALENIEEGIEGIDSEKSSLMPQIKFEKKFGQSPVFIASTLLEDGGVPPGASSASLLKEAIHVISCGYEDKTEWGKEVGWIYGSVTEDILTGFKMHCHGWRSVYCIPKRAAFKGSAPINLSDRLHQVLRWALGSVEILLSRHCPIWYGYGCGLKPLERFSYINSVVYPLTSVPLLAYCTLPAVCLLTGKFIVPEISNYASILFMLMFLSIAVTSILEIQWGGVGIDDLWRNEQFWVIGGVSAHLFALVQGLLKVLAGVNTNFTVTSKGGDDGEFSELYLFKWTTLLIP

SEQ ID NO: 84 - DNA, 3246 bp, Arabidopsis thaliana
atggaagcttcagctggacttgttgctggatcttacagaagaaacgagcttgttaggatcaggcacgagtctgatggtggaactaagcctctcaagaacatgaacggacagatctgccaaatctgcggagatgatgttggactcgctgagactggtgatgttttcgttgcttgtaacgagtgcgctttccctgtgtgtagaccttgttacgagtacgagagaaaggatggaactcagtgttgccctcagtgcaagaccagattcagaaggcatagaggatctccaagggttgagggtgatgaagatgaggatgatgtggatgatatcgagaacgagttcaactacgctcagggtgctaacaaggctagacatcagagacacggtgaagagttctcttcatcttctaggcacgagagtcagcctatccctcttctcactcatggacacactgtgtctggtgagatcagaacccctgatacccagtctgtgagaactacttctggacctctcggaccttctgataggaacgctatctcttctccttacatcgatcctaggcagcctgtgcctgttagaatcgtggatccttctaaggatctcaactcttacggactcggaaatgtggattggaaagagagagttgagggttggaagctcaagcaagagaagaacatgctccagatgaccggaaagtaccacgaaggtaagggtggtgagattgagggaactggatctaacggtgaggaactccagatggctgatgataccagactccctatgtctagggttgtgccaatcccttcatctaggctcaccccttacagagtggtgatcatccttaggcttatcatcctctgctttttcttgcagtacaggaccacccaccctgtgaagaatgcttaccctctttggctcacctctgtgatctgcgagatttggttcgctttctcttggctcctcgatcagttccctaagtggtatcctatcaacagggaaacctacctcgataggctcgctatcaggtacgatagagatggtgagccttctcagctcgttcctgttgatgtgttcgtgtctactgtggatcctctcaaagagcctcctctcgttactgctaacaccgtgctttctatcctctcagtggattaccctgtggataaggtggcatgctacgtgtcagatgatggatctgctatgctcaccttcgagtctctcagtgagactgctgagttcgctaagaagtgggttccattctgcaagaagttcaatatcgagcctagggctcctgagttctacttcgcacagaagatcgattacctcaaggataagatccaaccatctttcgtgaaagaaagaagggctatgaagagggaatacgaagagttcaaggtgaggatcaacgctctcgttgctaaggctcaaaagatccctgaagagggttggactatgcaggatggtactccttggcctggaaacaacactagagatcaccctggaatgatccaggtgttcctcggacattctggtggactcgatactgatggtaacgagcttcctaggctcatctacgtgagtagagaaaagaggcctggattccagcaccacaagaaagctggtgctatgaacgctctcatcagggtttcagctgtgcttaccaacggtgcttacctcctcaatgttgattgcgatcactacttcaacaactctaaggctatcaaagaggctatgtgcttcatgatggatccagctatcggaaagaagtgctgctacgttcagttcccacagaggttcgatggaatcgatctccacgataggtacgctaacagaaacatcgtgttcttcgatattaacatgaagggactcgatggtatccagggacctgtttacgttggaactggttgctgcttcaacaggcaggctctttacggatacgatcctgtgctcactgaggaagatctcgagcctaacatcatcgtgaagtcttgctgcggatctaggaagaagggaaagtcatctaagaagtacaactacgagaagagaaggggaatcaacaggtctgattctaacgctccactcttcaacatggaagatatcgatgagggattcgagggatacgatgatgagagatcaatcctcatgtctcagagatctgtggaaaagaggttcggacagtctcctgtgttcattgctgcaaccttcatggaacagggtggaatccctcctactactaaccctgctactctcctcaaagaagctatccacgttatctcttgcggatacgaggataagaccgagtggggaaaagaaatcggatggatctacggatctgtgaccgaggatatcttgaccggattcaagatgcacgctaggggatggatcagtatctactgcaatcctcctaggcctgctttcaagggatctgctccaatcaacctctcagataggctcaaccaggttctcagatgggcacttggatctatcgagatcctccttagtaggcactgccctatctggtacggataccacggtagacttagactcctcgagaggatcgcttacatcaacaccatcgtgtaccctatcacctctatcccacttatcgcttactgcatccttcctgctttctgcctcatcaccgatagattcatcatccctgagatctctaactacgcttctatctggttcatcctccttttcatctcaatcgctgtgaccggaatcctcgagcttagatggtctggtgtgtctatcgaggattggtggaggaatgagcagttctgggttatcggaggaacttctgctcatctcttcgctgttttccagggactccttaaggttctcgctggaattgataccaacttcactgtgacctcaaaggctaccgatgaggatggtgatttcgctgagctttacatcttcaagtggaccgctctcctcatccctccaacaactgttctcctcgttaacctcatcggaatcgtggctggtgtttcttacgctgtgaactctggttaccagtcttggggaccactcttcggaaagcttttcttcgctctttgggtgatcgcacacctctacccattccttaagggacttctcggaaggcagaacaggactcctactatcgttatcgtgtggtctgtgctcctcgcttcaatcttctcattgctctgggtgagaatcaaccctttcgtggatgctaaccctaacgctaacaacttcaacggaaaaggtggtgtgttctga

SEQ ID NO: 85 - DNA, 3198 bp, Arabidopsis thaliana
atggaatctgaaggtgaaactgctggaaagcctatgaagaacatcgtgcctcagacttgccagatctgctctgataacgtgggaaagaccgtggatggtgatagattcgtggcttgcgatatctgctcattccctgtgtgtagaccttgctacgagtacgagaggaaggatggaaaccagtcttgtcctcagtgcaagaccagatacaagaggctcaagggatctcctgctatccctggtgataaggatgaggatggacttgctgatgagggaaccgttgagttcaactaccctcagaaagagaagatctctgagaggatgctcggatggcatctcactagaggtaagggtgaagaaatgggagagcctcagtacgataaggaagtgtctcataaccacctccctaggctcacctctagacaggatacttctggtgagttctctgctgcttctcctgagaggctctctgtgtcatctactatcgctggtggaaagaggctcccttactcttctgatgtgaaccagtctcctaacagaaggatcgttgatcctgttggactcggaaacgtggcatggaaagaaagagtggatggatggaagatgaagcaagagaagaacaccggacctgtgtctactcaagctgcttctgaaaggggtggtgtggatatcgatgcttctaccgatatcctcgcagatgaggcacttctcaacgatgaggctagacagccactctctaggaaggtgtcaatcccatcttctaggatcaacccttacagaatggtgatcatgctcaggctcgttatcctctgcttgttcctccactacaggatcactaaccctgtgcctaacgctttcgctctctggctcgtttctgttatctgcgagatctggttcgcactctcttggatccttgatcagttccctaagtggttccctgtgaacagagagacttacctcgatagactcgctctcaggtacgatagagagggtgagccttctcaactcgctgcagttgatatcttcgtgtctaccgtggatcctctcaaagagcctcctctcgttactgctaacaccgtgctttctatcctcgctgtggattaccctgtggataaggtgtcatgctacgtgtcagatgatggtgctgctatgctctcattcgagtctctcgctgagacttctgagttcgctagaaagtgggtgccattctgcaagaagtactctatcgaacctagggctcctgagtggtacttcgctgctaagatcgattacctcaaggataaggttcagacctctttcgtgaaggatagaagggctatgaagagagagtacgaagagttcaagatcagaatcaacgctctcgtgtctaaggctctcaagtgtcctgaagagggatgggttatgcaggatggaactccttggcctggaaacaacactagagatcaccctggaatgatccaggtgttccttggacaaaacggtggattggatgctgagggaaacgagcttcctagactcgtgtacgtgtcaagagaaaagaggcctggattccagcaccacaagaaagctggtgctatgaacgctcttgtgagggtttcagctgtgctcactaacggacctttcatcctcaacctcgattgcgatcactacatcaacaactctaaggcactcagggaagctatgtgcttcctcatggatcctaacctcggaaagcaggtttgctacgttcagttcccacagaggttcgatggaatcgataagaacgataggtacgctaataggaacaccgtgttcttcgatatcaacctcagaggactcgatggtatccagggacctgtttacgttggaactggatgcgtgttcaacaggactgctctttacggatacgagcctcctatcaaggtgaagcacaagaagccttcactcctcagtaagctctgcggaggatctaggaagaagaactcaaaggctaagaaagagagtgataagaagaagtctggaaggcacaccgattctaccgtgcctgtgttcaaccttgatgatattgaagagggtgttgagggtgctggattcgatgatgagaaagctctcctcatgtctcagatgtctctcgagaagaggttcggacagtctgctgtgttcgttgcttcaaccctcatggaaaatggtggtgtgcctccttctgctacccctgaaaaccttcttaaagaggctattcacgttatctcttgcggttacgaggataagtctgattggggaatggaaatcggatggatctacggatctgtgaccgaggatattctcaccggattcaagatgcacgctaggggttggagatctatctactgcatgcctaagctccctgctttcaagggttctgctccaatcaacctctctgataggctcaaccaggttctcagatgggctttgggatctgttgagatcctcttcagtaggcactgccctatctggtacggatacaacggtagactcaagttcctcgagaggttcgcttacgtgaacactaccatctaccctattacctctatccctctcttgatgtactgcacccttcctgctgtttgcctcttcaccaaccagttcatcatccctcagatctctaacattgcttctatctggttcctcagtctcttcctctcaatcttcgctaccggaatccttgagatgaggtggtctggtgtgggaattgatgagtggtggagaaatgagcagttctgggttatcggtggtgtgtctgctcatctcttcgctgttttccagggaatcctcaaggttctcgctggaattgataccaacttcaccgtgacctctaaggcttctgatgaagatggtgatttcgctgagctttacctcttcaagtggactaccctccttatccctcctacaacactcctcatcgtgaacctcgttggagttgtggctggtgtgtcatacgctatcaactctggttaccagtcatggggaccactcttcggaaagcttttcttcgctttctgggtgatcgtgcacctctacccattccttaagggactcatgggtagacagaacaggactcctactatcgttgtggtgtggtctgtgctcctcgcttcaatcttctcactcctctgggtgagaatcgatccattcacttctagagtgaccggtcctgatatcttggagtgcggaatcaactgctga

SEQ ID NO: 86 - DNA, 3452 bp, Brassica napus
gatctaatcgcatttcgcttatccccagcagatttgaactctccctacgattcgttgatcgtatatggaatccgaaggagaaaccgcgggtaagccgatgacgagcgtcggcggccagatatgccagatctgtagtgacaatgtaggcaagactgttgatggagaccggttcgtggcgtgtgatgtttgtggattcccggtttgcaggccttgctatgagtttgagaggaaggatgggaatcaatcttgtcctcagtgcaaaaccacttacaagaggcacaaggggagtcctgctattcctggtgataaagatgaggatgtcttcgctgatgaagcaactgttgagttaagctacccgcagaaggagaagatttcggagaggatgcttgggtggcatcttacacgtggcaaaggagaggagatggggcagcctgagtatgacaaagaggtttctcataatcatctccctcgtctcaccagtagacaagagacttcaggagagttttctgctgcctcgcctgaacgcctctctgtttcttctaccattggtggtggaaagcgccttccctattcatctgatatcaatcaatcaccacatagaaggatttcggatcctgttggactagggaatgtagcttggaaggagagagttgatggctggaaaatgaagcaggagaagaataatggtggtcctgtgagcacccaggctgcttctgaaagaggtggaggagatattgatgccagcactgatatcctcgcagatgaggctttgctgaatgacgaagcgagacagcctctgtcgaggaaagtttcgattccttcatcaaggatcaatccttaccgaatggttattatgttgcgtcttgtcattctatgtctcttcttgcactaccgtataacaaatccagtgccaaatgccttcactctgtggctgatctcagtgatatgtgagatctggtttgccttttcctggattttggatcagtttcccaaatggtttcctgtcaaccgtgaaacctacctagataggcttgctttaagatatgatcgtgaaggtgagccttcacagctagcggctgtggacatcttcgtgagtactgttgaccccttgaaggagccaccccttgtgactgctaacacagtgctctctattttggctgttgactacccggttgacaaggtgtcctgttatgtttctgatgatggtgctgctatgttatcatttgaagcacttgcagaaacatcagagtttgctcgtaaatgggtaccattctgcaagaaatatagcattgagcctcgcgcaccagaatggtattttgctgcgaaaatagattatctgaaggataaagttcagacatcatttgtcaaagatcgtagagctatgaagagggaatatgaggaatttaagatccgaatcaatgcacttgtttctaaggcccttaaatgtcctgaagaagggtgggttatgcaagatggcacaccatggcctggaaataatacaagagaccatccaggaatgatccaggttttcttagggcaaaacggtgggcttgatgcagagggcaatgagcttccgcgtttggtgtatgtttctcgagaaaagcgaccaggattccagcaccacaaaaaggctggtgctatgaatgcacttgttagagtttcagcagtccttaccaatggacctttcatcttgaatcttgattgtgatcattacatcaataacagcaaggccttgagagaagcaatgtgcttcctgatggatccaaacctagggaagcaagtgtgttatgttcagttccctcaaagattcgatggtatcgataagaacgatagatatgctaatcgtaataccgttttctttgatatcaacttgagaggtttagatgggattcaaggacctgtatatgtgggaactgggtgtgttttcaacagaacagcattatatggttatgaacctccaattaaagtaaaacacaagaagccaagtcttttatctaagatctgtggtgggtcaagaaagaagaattccaaatctaagaaagattcggacaaaaagaaatcaggcaggcatactgactcaactgttcctgtattcaaccttgatgacatagaagagggagttgaaggtgctggttttgacgatgaaaaggcgctcttgatgtcacaaatgagcctggagaagcgatttggacagtctgctgtttttgttgcgtctaccctaatggaaaatggaggcgttcctcctacagaaactcctgaaaaccttctcaaagaggcgatccatgtcattagttgtggatacgaggataagtcagactggggaatggagattggatggatctatggttcggtgacagaagatattctgactgggttcaagatgcatgcccgtggatggagatccatttactgtatgccaaagcttccggcgttcaaggggtctgctcctatcaatctttcagatcgtctgaaccaagtgctgaggtgggctctaggttccgttgagattctcttcagtcggcattgtcctatatggtatggttacagtgggaggcttaaatttcttgagaggtttgcatatgtgaacaccaccatctacccactcacctccgtccctcttctcttgtattgtacattgcccgccgtttgtctcttcaccaaccagttcatcatccctcagattagtaacattgcaagtatatggtttctgtctctctttctgtctattttcgccacgggtatactcgaaatgaggtggagtggcgtaggcatagacgaatggtggagaaacgagcagttctgggtcattggaggagtatccgctcacttattcgccgtgtttcaaggtctcctcaaagtcctagccggtatcgacacaaacttcacagtcacgtcaaaagcttcagacgaagacggagacttcgctgagctctacttgttcaaatggacaacgcttctgattccgccgacgacgctgctcattgtaaacctcgtgggagttgttgcgggattctcgtacgcaatcaacagtggataccaatcttggggaccgctctttggtaagctgttcttcgcgttttgggtgattgttcacttgtaccctttcctcaagggtttgatggggagacagaacaggactcccaccattgttgtggtctggtctgttctcttggcttccatcttctccttgttgtgggttaggatcgatcccttcactaaaagagtcactggcccggacatactcgaatgtggaatcaactgttgagaagtgagcaataatatgctttttgggcttcaaaagacgcagaaaatatataattttattgttttatttgttaaacggtttatttatcttgtttgtgtgtattgtcttgttcttgtttcgttttttcatgtgtagaatatattaccctagttactttggaaagattattaagtcaaaagcgaatatt

SEQ ID NO: 87 - DNA, 3676 bp, Brassica napus
aaaataggcaaatcagattggtgtttgaagtttaggatcaaagaaagaaagaaagagagtgtcagtgttgaacatctctctgtcggtgtgtgatctgactcatcagcatcaatggaggccagtgccggcttggtcgctggttcctaccggagaaacgagctcgttcggatccgtcacgaatccgacggcgggtccaaagctatgaagaatatggatccacatacatgtcagatctgtggtgataacgctgggctcactgaaactggagatctttttgtggcttgcaatgaatgtgccttccctgtctgccgtccttgctatgagtacgagaggaaagatggaactcagtgttgccctcaatgcaagactagatacagacgtctcaggggtcatcctcgtgttgaaggggatgaagatgaggatgatgttgatgatattgagaacgagtttaattacgctcaaggagctaacaagggaagacgccaacaacgtcatggtgaagagttctcttcctcttctagacatgaatctcaaccaattcctcttctcactcatggccacacggtttcaggggaaattcgcacgcctgacacacaatctgtgcgtactacatcaggtcctttagggcctggtgacaggaatgccatttcatctccatatattgacccacgccaacctgtacctgtgagaatcgtagacccttcgaaagatttgaactcttatgggcttggcaatgttgactggaaagaaagggttgaaggctggaagctgaagcaggagaagaatatggtacagatgactggtaaataccacgaagggaaaggtggagaaattgaaggcactggttccaacggcgaagaactccaaatggctgatgattcgaggctgcctatgagccgtattgtgcctatcccgccttctcatctcacaccttaccgggttgtgattattctccggcttatcatcttgggattcttcttgcaatatcgtacaactcaccctgtgaaagatgcttatccattgtggttgacctcagttatttgtgagatctggtttgcattttcttggcttctcgatcagtttcccaaatggtaccctattaaccgagagacttatcttgaccgtctcgctataagatatgatcgagacggtgaaccatcgcagcttactcctgttgacgtgtttgttagtacagtggacccactgaaagagcctcctcttgtaacagcaaacacagttctctcgattcttgctgtggactacccggtagacaaagtagcctgttatgtttcagacgatggtgcagctatgctgacgttcgaatctctttctgaaactgccgagttcgcaaagaaatgggtgccattttgcaagaagtttagcattgaacccagagcccctgagttctattttgcacagaagatagattacttgaaggacaagatccagccttcttttgttaaagaacgacgagctatgaagagagagtatgaagagtttaaggtgaggatcaatgcacttgttgctaaagcacagaagatccctgaagaaggatggacgatgcaggatggtactccctggcctggtaacaacactagagatcatcctggaatgattcaggtgttcttaggccacagtggaggtctagatactgatggaaatgagctgcctaggctcatctatgtttctcgtgaaaagcggcctggatttcaacaccacaagaaggctggagctatgaatgcattgatccgtgtttctgctgttctgaccaatggagcttatctattgaacgtggattgtgatcattacttcaacaacagcaaagctattaaagaagccatgtgtttcctgatggaccctgcttatggaaaaaaatgctgctacgtccagttccctcagcgttttgatggtattgacttgcacgatcgttacgccaacaggaatatagtcttcttcgatattaacttgaaggggttagatggaatccagggtccagtatatgtgggtactggttgctgtttcaataggcaagctctatatgggtatgatcctgttttgactgaggaagatctggaaccaaatattattgtcaagagctgttgtggctcaaggaagaaaggaaagaaaagcaagaagtataactatgatcaacagaggagaggcatcaacagaagtgactccaatgctccacttttcaacatggacgacatagaagagggttttgaaggttatgatgatgagaggtctattctaatgtcccagaagagtgtagagaagcgttttggtcagtccccagtgtttattgcggctaccttcatggaacaaggtggcattccaccaacgaccaatccagctactcttctcaaggaggctattcatgttataagctgtggctacgaggacaagactgaatggggaaaagagattggttggatctatggttctgtgacagaagatattcttactgggttcaagatgcatgcccggggttggatgtccatctactgcaatcctccacgacctgcgttcaagggatctgcaccaatcaatctttctgatcgtttgaaccaagttcttcgatgggcgttgggatctattgagattctcctgagtagacattgccctatctggtatggctatacaggaaggttgagactcttggagagactcgcttacatcaacaccattgtctaccctattacagctctcccactcatcgcctactgtatccttcctgctttttgcctcatcactgacaagttcatcataccagagataagcaactacgcgagtatctggtttattcttctcttcatctcaatcgctgtgactggagttctagagctgagatggagcggcgtgagcattgaggactggtggaggaacgagcagttctgggtcatcggtggaacatctgctcatcttttcgcagtcttccaaggtctactcaaggttcttgcgggtatagacactaacttcactgtcacatccaaagcctcggacgaagatggggatttcgcggagctttacatcttcaaatggacagctcttctcattccaccgaccacagtgctagttgtgaacctcataggcattgtggctggtgtctcttacgctgtgaacagtgggtaccagtcatggggaccgctctttgggaagcttttcttcgccttgtgggtcattgcccatctctaccctttcttgaaaggtctaatgggaagacagaacagaacgccaaccatcgtcatcgtttggtctgttcttctggcctccatcttttcgttgctttgggtcaggatcaatccttttgtctctgtcactcccgaggccaaccccactgccgtcccaggaggtgtcttttagaccctattttatatatattttgtaagcgcatatacggaatgggagcactctctaaatcttctaagcctcaaaaccaagtgaaccaggcggttagttttctcttagcggtcagagagttatgaagttattggtacttgtcaccgttgtgatggtgtctctcttttgaaacatagagccacaagtaatactttgttattattatattatatttattaattttgcttctcacctcaccttgtaatgttggagctttgttgttgtcctaacgagtctatatatgcgctttcactataatacaaaagttttattcaac

SEQ ID NO: 88 - DNA, 3660 bp, Brassica napus
ggatatgatttgttacaatatttaatattattgttttatgaattagaagagtgacaagaggcaaagagcagagacaaatagcagcttacaaatatctctctctcttctagagaaagaatcgcagattcatagagatctgaagagtcacatcacaacgactccatcttcagatctcatgatttgagctaccccgacgattcggtgatcggagaaagtaagcgacgatggaatccgatggagaaaccgcggggaagccgatgacgagcgtcggtgggcagatatgccagatctgcagcgacaatgtcggcaagactgttgacggtgaccgtttcgtggcctgtgatatctgtggattccctgtttgcaggccttgctatgaatacgagaggaagcacgggaatcaatcttgtcctcagtgcaaaaccacttacaagaggcacaagggtagtcctgctattcccggtgataaggatgaggatgtcttcgctgatgaggccaccgttgagctcaactacccgcagaaggagaagatttcggagcggatgcttggatggcatcttacgcgtgggaaaagtgaggagatggggcagcctgagtatgacaaggaggtttctcacaaccatctccctcgtctcaccagtagacaagatacttcaggtgagttttctgctgcctcgcctgaacgtctctctgtgtcttctactatagctggtggaaagcgtcttccctattcatctgatatcaatcaatcaccaaatagaaggatttcggatcctgttggactagggaatgtagcttggaaggagagagttgatggctggaaaatgaagcaggagaagaataatggtggtcctgtgagcacccaggctgcttctgaaagaggtggaggagatattgatgctagcactgatatcctcgcagatgaggctttgctgaatgacgaagcgaggcagcctctgtcaaggaaagtttctattccttcatcacggatcaatccctacaggatggttattatgttgcggcttgttatcctgtgtctcttcttgcactaccgtataacaaatccagtgccaaatgccttcactctgtggctgatctcagtgatatgtgagatctggtttgccttttcctggattttggatcagtttcccaagtggtttcctgtgaaccgtgaaacctacctcgacaggcttgctttaagatatgatcgtgaaggtgagccgtcacagttagctgctgtggacatcttcgtgagtactgttgaccctttgaaggagccacctcttgtgacagccaacacagtgctctctattttggcggttgactacccagttgacaaggtgtcttgctatgtttccgatgatggtgctgccatgttatcatttgaagcacttgcagaaacatcagagtttgctcgtaaatgggtaccattctgcaagaaatatagcattgagcctcgcgcaccagaatggtattttgctgcgaaaatagattacttgaaggataaagttcagacatcatttgtcaaagatcgtagagccatgaagagggagtatgaggaatttaagatccgaatcaatgcacttgtttccaaggccctaaaatgtcctgaagaagggtgggttatgcaagatggtacaccatggcctggaaataatacaagggaccatccaggaatgatccaggttttcttagggcaaaatggtggacttgatgcggagggcaatgagcttccacgtttggtgtatgtttctcgagaaaagagaccaggattccagcaccacaaaaaggctggtgctatgaatgcacttgttagagtttcagcagtacttaccaatggacctttcatcttgaatcttgattgtgatcattacataaataacagcaaggccttgagagaagcaatgtgcttcctgatggacccaaacctagggaagcaagtttgttatgttcagttcccacaaagattcgatggtattgataagaacgatagatatgctaatcgtaataccgtgttctttgatattaacttgagaggtttggatgggattcaaggacctgtatatgtgggaactgggtgtgttttcaacagaacagccttatatggttatgaacctccaataaaagtaaagcacaagaagccaagtctcttatctaagctctgtggtggatcaagaaagaagaattccaaatctaagaaagattcggacaaaaagaaatcaggcaggcatactgactcaactgttcctgtattcaacctcgatgacatagaagagggagttgaaggtgctggttttgacgatgaaaaggcgctcttgatgtcgcaaatgagcctggagaagcgatttggacagtctgctgtttttgttgcttcaaccctaatggaaaatggaggtgttcctcctacagaaactccagaaaaccttctcaaagaggctatccatgtcattagttgtggttacgaggataagtctgattggggaatggagattggatggatctatggttctgtgacagaagatattctaactgggttcaaaatgcatgcccgtggatggagatccatttactgtatgccaaaacttcccgctttcaaggggtctgctcctatcaatctttcagaccgtcttaaccaagtcctgaggtgggctctaggttcggttgagattctcttcagtcggcattgtcctatatggtatggttacagtgggaggcttaagtttcttgagaggtttgcgtatgtgaacacaaccatctacccactcacctccgtccctcttctcttttattgtacattgcccgccgtttgtctcttcaccaaccagttcatcattcctcagatcagtaacattgcaagtatatggtttctgtctctctttctgtctattttcgccacgggtatactcgaaatgaggtggagcggcgtagggatagacgaatggtggagaaacgagcagttctgggtcatcggtggagtatcagctcacttgttcgcggtgtttcaaggtctcctcaaagtcctagctggtatcgacacgaacttcactgtcacgtcaaaggcttcagacgaagacggagacttcgcggagctctacttgttcaaatggacaacgcttctgattcctcccaccacgctgctcatcgtaaacctcgtgggagttgtcgcgggattctcgtatgctatcaacagtggataccagtcgtggggaccgctctttggtaagctgttcttcgccttttgggtgattgttcacttgtacccattcctcaagggtttgatggggagacagaacaggactcctactattgttgtggtctggtctgttctcttggcgtccatcttctccttgttgtgggttaggatcgatcctttcactaaaagagtcactggcccggacattctggaatgtggaatcaactgttgagatgtgagagcaatgatatgcttttgggtggtttaagaaacacataattataaagtttatatttattattgttttatttgtcttgtctattgtctgtttgtgtcgtgtaagattaaagagtatttttgtttatgtgatgaagaagcaagcagtggatatagtttcatgttgtatttttcaagagatagaaaacataaatctattgtttggaatgagaaatcatttagagactttg

SEQ ID NO: 89 - DNA, 3705 bp, Brassica napus
cggaacacacagacacagcgattaaataggcaaaagcagatttgttaaaaaaactcaaatcagacaaagagatacatagagagagagagtgtgtgtgttagtgtgaacatcttcttttgagttcgagagagaggtttttcgagatgccgtattgaatcggccaaagaattgaaattgcaatctctctgtctctgtgtgtttgtgtgtttgtcggtggctcgttgacttcttcactcatcagcgatggaggccagttccggcttggttgctggatcttaccggagaaacgagctcgttcgtatccgtcacgaatctgacggcgggtccaaacctttgaagaatatggaccgtgagatatgccagatctgtggtgaccacgctggtctcaccgaaactggagatctctttgtggcttgcaatgaatgtgccttccctgtgtgtcgtccttgctatgattacgagaggaaagatggaactcagtgctgccctcactgcaagactagatacagacggctcaggggtcatcctcgtgttgaaggagatgaggatgaggatgatgttgatgatatcgagaatgagttcagctacgcccagggaggagctaacaagccgagacgccgtgaagagttttcctcctcctctagacatgattctcagccaattcctcttctcacccatggccatggggtttctggagagattcggacgcctgatacacaatctgtgcgaactacatcaggtcctttggggcctggtgagaggaacgccatttcatcttcatatattgacccacgccaacctgtccctgtaaggatcgtggacccgtcaaaagacttgaactcttacgggcttggaaacgttgactggaaagaaagagttgaaggctggaagctgaaacaggagaagaacatgttacagatgactggtaaatatcatgaagggaaaggaggagagattgaagggactggttccaatggcgaagaactccaaatggctgatgatacgcgacttcctatgagccgtattgtgcctatcccgccttctcatctcacaccttatcgtgttgtgattattctccggcttatcatcttgggattcttcttgcaataccgtacaactcaccctgtgaaagatgcatatccgttgtggttgacttcagttatttgtgagatctggtttgcattctcttggcttcttgatcagtttcccaaatggtaccccattaacagagagacttatcttgaccgtctcgctataagatatgatcgagagggtgaaccatctcagcttactcctgttgatgtgtttgttagtacggtggacccactgaaagagccacctcttgtaacggcaaacacagttctctcgattcttgccgtggactacccggtagataaagtagcctgttatgtttcagatgatggtgcagcgatgcttaccttcgaatctctttctgaaactgctgagttcgcaaagaaatgggtgcctttttgcaagaaattcagcattgaacccagggctcctgaattctattttcagcagaagatagattacctgaaggacaagatccagccttcttttgttaaagagcgacgagctatgaagagagagtatgaggagtttaaggtgaggatcaatgcacttgttgctaaagcacagaaaatccctgaagaaggctggacgatgcaggatggtactccctggcctggtaacaacactagagatcatcctggaatgatccaggtgttcttaggccacagtggaggtctagataccgatggaaatgagctgcctagactcatctatgtttctcgtgaaaagcggcctggattccagcatcacaaaaaggctggagctatgaatgccttgatccgtgtttctgctgttcttaccaatggagcatatcttttgaacgtggactgtgatcattacttcaacaacagcaaggctattaaagaagccatgtgtttcttgatggaccctgcttacggaaagaagtgctgctatgtccagttcccacagcgtttcgatggtattgatttgcacgatcgatatgccaacaggaatattgtcttcttcgatattaacttgaaggggttagatggtatccaaggtccagtatatgtgggtactggatgttgtttcaacaggcaagctctatatggatatgatcctgtcttgacagaggaagatttaaaaccaaacatcattgtcaagagctgctgcggctcaaggaagaaaggaaagaacagtaagaaatatagctatgatcaaaaaaggagaggcatcagcagaagtgattccaatgctccacttttcaacatggacgacatcgatgagggtttcgaaggatatgatgatgataggtctattctaatgtcccagaagagtgtggagaagcgttttggtcagtcgccagtatttattgctgccacgtttatggaacaaggtggcattccaccaacgaccaatccagctactcttctcaaggaggctattcatgttataagctgtggttacgaggacaagactgagtggggaaaagagattggttggatctatggttctgttacagaagatattcttactggattcaagatgcatgctcgtggttggatgtctatctactgcaatcctccacgacctgcgttcaagggatctgcaccaatcaatctttctgatcgtttgaaccaagttcttcggtgggcgttgggatctatcgagattcttctgagtagacattgccctatctggtatggctatacaggaaggttgagactcttggagaggctcgcttacatcaacaccattgtctaccctattacagctctccctctcatcgcctattgtattcttccagctttttgcctcatcactgacaagttcatcatacctgagataagcaactacgcgagtatttggttcattcttctcttcatctccattgctgtgactggaatcctggagctgagatggagcggtgtgagcattgaggactggtggagaaacgagcagttctgggtcattggaggcacatctgctcatctttttgcagtcttccaaggtctactcaaggtacttgcgggcatcgacactaacttcaccgtcacatcaaaagcctcagacgaagatggggacttcgcagagctttacatcttcaaatggacagctcttctcattccaccaaccacggtcctagttgtgaacatgataggcattgtggctggtgtctcttacgctattaacagcgggtaccagtcatggggtccgctctttgggaagcttttcttcgccttgtgggtcattgcccatctctacccgttcttgaaaggtctgcttggaagacagaacagaacaccaaccatcgtcattgtttggtctgttcttctcgcctccatcttttcgttgctttgggtcaggatcaatccatttgtctctgtcactccagctgccaaccccaatgccgtccctggtggtgtcttttagaccctatttttatatacattttgtgtgcatattatggtgaaaccgagcggttatggtgatgcagtgttagctttctctgtgtagcaagagagttatgaaactgttggtggctgtcattgttgtgatgatcttaattattttggtatgttatagtttttccagtggagaagatgtgtaaaccaaatgatacataagtctacaaaagataatctttaattc

SEQ ID NO: 90 - DNA, 3255 bp, Glycine max
atggaagcaagtgcgggaatggttgccggttcgcataaacggaacgagctcgttcggattcgccacgattcttctgacagcgggtctaaacccatgaagaatttgaatgggcaaatctgtcaaatatgcggtgatactgttggattaactgctactggtgatgtgtttgttgcttgcaacgagtgtgctttccctgtgtgtcgtccttgttatgaatatgagcggaaggatgggaaccagtcttgtccacagtgcaagactagatacaagaggcacagagggagtcctcgagttgagggtgatgaagatgaagatgattctgatgatatcgagaatgagttcaattatgcccaaggaaaagccaaggccaggcggcagtgggaagacgatcctgacctgtcgtcgtcttctagacgtgaatctcaacagccaattcccctcctcaccaatggccaaacgatgtctggtgagattccatgtgccacacctgatactcaatctgtgcgaactacttcaggtcctctgggcccatctgaaaaggttcactcacttccctatgttgatccaaggcaaccagttccagtaagaattgtggacccatcaaaggacttgaattcttatggtctgggaaatgttgactggaaagaaagggttgaaggttggaagcttaagcaggagaaaaatatggtgcaaatgactggtagatacgctgaagggaaaggtggagatgttgaagggactggttctaatggagaagaacttcaaatggtagatgatgctcgacaacctatgagtcgtgttgtgccaattccttcatctcagctgacgccttatcgtgttgttatcatcctccggctgattattcttggcttcttcttacaatatcgtgtaactcatcctgtgaaagatgcatacccactgtggttgacatcagttatttgtgagatttggtttgccttatcctggctcttggatcagtttccaaaatggtctcccattaatcgtgagacttatcttgaacggcttgctttaaggtatgatcgtgaaggagaaccatcacagttagatcctgttgatgtgtttgttagtacagtggatcccctcaaagagccacctcttgttactgcaaacaccgttttgtctatactttctgttgattaccctgtcgacaaagtttcctgctatgtatcagatgatggttcagctatgttgacctttgaagcactatctgaaacagctgagtttgcgaagaagtgggtgcccttttgcaaaaagcacaatattgaaccaagagccccagagttttattttgcccagaagattgattacttaaaggacaagattcagccctcgtttgtaaaagagcgacgggcaatgaagagagaatatgaagaattcaaagtacggatcaatgcccttgtagccaaagctcagaagatgccagaggaaggttggacaatgcaggatggaactccttggcctggaaataatcctagggatcatccgggaatgattcaggtgtttttaggtcatagtggggggctggatacagatggaaatgagctgcctagacttgtttatgtttctcgtgagaagcgaccaggcttccaacatcacaagaaggctggagctatgaatgctttgattcgagtttctgctgtcttgaccaatggtgcatatcttctgaatgtggattgtgatcactatttcaataatagcaaagccctcaaagaagccatgtgtttcatgatggatcctgttcttggaaagaagacatgctatgttcaatttcctcagagatttgacggcattgacttgcacgatcgatatgccaatcgcaatattgtgttctttgatatcaacatgaaaggtcaggatggtgttcagggcccagtctatgtgggaactggttgttgtttcaataggcaagctttgtatggttatgatcctgttttgactgaggaagatttggaacctaacattattgtaaagagttgttgcggttctagaaagaagggaaagggtggcaataagaagtacagtgacaagaagaaggcgatgggaagaactgaatccactgtacccatatttaatatggaagacatagaggagggtgttgaaggttatgatgatgaaaggacactacttatgtctcaaaagagcttggagaagcgttttggtcagtctccagtttttattgctgccactttcatggagcagggtggcattccaccttcaacgaaccctgcaactcttcttaaggaagcaatccatgttatcagctgtggttacgaagacaagacagaatggggcaaagagattggatggatctatggctctgtgacagaagatatcttgactgggttcaagatgcatgctcgtggttggatttccatctattgcatgccacctcgcccagcatttaagggttctgctcctatcaatctttctgatcgtctcaatcaggtgcttcggtgggccttgggttcaattgagatctttctaagcaggcattgtcccttgtggtatggctacaatgggaagttgaagcctctgatgaggcttgcttatattaacaccattgtctacccgtttacctcaatcccattgattgcttactgtacgcttcctgcattttgtcttctcacaaataaatttattattcctgagataagcaactttgccagtatgtggttcattcttctctttgtctccatttttaccacttcaattcttgagcttaggtggagtggggtcagtatagaagactggtggagaaatgaacagttctgggttatcggtgggacatctgcgcatctctttgctgtgttccaggggcttctaaaagtgcttgctgggatcgatacaaattttactgttacatcgaaggcatcggacgaggatggggactttgccgagctttatgtgtttaaatggacatcacttctcatccctcctacaacagtgcttattgtgaatttggttgggattgtggctggtgtatcctatgccataaacagtggttaccagtcttggggtccactatttggcaagctgttctttgctatctgggtcattgcccatctatacccattcttgaagggtctcttgggcaggcaaaatcgtaccccaaccattgttattgtttggtccgttcttcttgcttcaatattctccttgctgtgggtgaggattgatcccttcacctctgactccaacaaattaaccaatggtcaatgtggcatcaactgttag

SEQ ID NO: 91 - DNA, 3225 bp, Glycine max
atgatggagtcagaaggagaagctggggcaaagccaatgaaaacattgggtggcaaaatctgccagatctgtggtgataatattgggaacaatgcgaatggcgatcctttcattgcctgcgatgtttgcgctttccctgtctgcagggcgtgctatgaatatgaaaggaaggatggaaatcagtcttgccctcagtgcaagacccggtacaagaggcacaaaggaagtcctgcaattcttggagaccgagaagaggatgggggtgctgatgatggtgccagtgacttcaattacaattcagagaatcagaatgaaaagcagaagattgagcatatgttgggctggcaaatggcatatgggcgtgcagaggaggccattgctccgaattatgataaggaagtttctcacaatcacattcctctgctctccggtggacaagaggtttctggagaattatctgctgcctcacctgagaggctgtcaatggcatccccaggtggccgagggaagcgtgcccataatcttcaatattcgtctgaccttaatcattcaccaaatatcagggttggggatcctggattgggcaatgtggcatggaaagaaagagttgatggctggaaaatgaagcaagataagaatgttgctccaatgagcacgggccaagctacttctgaaagaggagctggagatattgatgctagtactgatgtgcttgtggacgattccttgttgaatgatgaggctcggcaacccctctctaggaaggtttctattccatcatctaggatcaatccataccgtatggtcattgctctgcggttggttatcctatgcatttttctgcattatcgaataacaaatcctgtgcccaatgcatatgcattgtggttgatatcagttatatgtgagatttggtttgccatatcttggatattggatcaattccccaagtggctccctgtgaaccgtgaaacatatcttgacagacttgcactaagatatgatcgggaaggggaaccatcacagctagcagctgttgacatttttgtcagtactgttgatccattaaaagaacccccgcttgtgactgctaacactgtcctatctattctttctgttgactacccagtggataaggtctcctgttatgtctctgatgatggtgctgctatgttgacatttgaagctctggctgagacatcagaatttgctaggaaatgggttcctttcagcaagaaatataatatcgaacctcgggcacctgagtggtattttgcacagaagattgactacttgaaagataaggttcaaccatcatttgtcaaagatcgtagagcaatgaagagagaatatgaagaatttaaaattcgcatcaatggacttgttgcaaaggcacaaaagattcctgaagaaggatgggtgatgcaagatggtacgccatggcctggaaacaacactagagaccatccaggaatgattcaggttttcttgggccaaagtggaggacttgacactgagggtaatgaacttccacgtttagtctatgtttctcgtgaaaagcgtccagggttccaacatcacaagaaggctggtgccatgaatgcacttgttcgagtgtcagcagtccttactaatggacctttcttattgaatcttgattgtgatcactacataaacaacagtaaagccttgagggaagctatgtgctttatgatggatcccaaccttgggaaaaatgtttgctatgtccagtttccacagaggtttgatggtattgataggaatgatcgatatgccaatcgcaatactgttttctttgatataaacttgagaggtttggatggcattcaaggtcctgtttatgtgggtactggatgtgtctttaatagaacagctttgtatggctacgaacctcctattaaacccaagcataaaaagcctgggtttctttcttcactctgtggtggtaaccgaaagaagagatcaaaatctagcaagaaaggctcagacaagaaaaaatctagcaagaatgttgacccaactgtgcccatctttagtcttgaggatatagaagagggggtggaaggtgctggatttgatgatgagaaatcactacttatgtcacaaatgagcctcgagaaaaggtttggtcagtctgctgtctttgttgcctctacactcatggagaatggtggcgttcctcagtctgcaactccagaaactcttcttaaggaagctattcatgttatcagttgtggttacgaggataaatcagaatggggaagtgagataggatggatctatggttctgtcacagaagatattcttactggattcaagatgcatgcccgaggttggaggtctatttactgcatgcccaagctcccagcgtttaaaggttctgctcctatcaatctttcagatcgtctgaaccaagtgcttcgatgggctttaggttcggtggaaattctttttagtcgacattgtcccatctggtatggttatagtggaaggctaaagtggctcgagaggttcgcatatgtgaacaccacaatctatccagtcacttccattccccttctcatgtattgtaccttacctgctgtctgtctcctgactaacaagttcattattccacagattagtaacattgcaagtatatggtttatctctctctttctttccatctttgccacgggtatccttgagatgaggtggagtggtgttggaattgatgagtggtggagaaatgaacaattttgggttatcggtggtgtctcggcccatctttttgccgtgttccaaggtttactcaaagtgcttgctggaattgacactaacttcactgttacctcaaaagcatcagatgaggatggagactttgcagaactctacatgttcaaatggacaacccttctcatcccacccacgacgcttctcatcataaacctggtgggggttgttgcaggcatctcctatgccatcaacagtggctaccaatcatggggtcccctctttggtaagcttttctttgcattttgggtgatcatccatctctaccctttcctcaaaggtctcatgggtcgccagaacagaacaccaaccattgtggtggtctggtccattcttcttgcatctatcttctctctgttgtgggtccgaattgacccgtttacgacaagagtcactggtcctgatgttgagcagtgtggaatcaactgctag

SEQ ID NO: 92 - DNA, 3240 bp, Glycine max
atggaatcagaaggggaagctggggcaaagccagtgacagcattgggtgcccaagtgtgccagatttgtggtgatggtgttgggaagactgtggatggtgaaccgttcgttgcgtgcgatgtttgcgctttccctgtctgcaggccttgctatgagtatgagaggaaggatgggaatcaatcttgcccccagtgcaaaacccggtacaagaggcacaagggaagtcctgcaattcttggagacatggaagaggatggtgctgctgctgctgatgccagtgacttcaattatgattcagaaaatcaaaatcaaaatcaaaaccaaaagcagaagatttcagagcgcatgttaagctggcaattgacatacccacgaggagaggaggttggtgctccaaattatgataaggatgtttctcacaaccacattcctctgctgaccagtggacaagaggtatctggagagttgtctgcagcctcacctgagaggctctcaatggcatctcctgcagttggtggtggaaagcgtgtccataatattccatattcatctgacattaatcaatctccaaatatcagggctggggatccaggattgggcaatgttgcatggaaagaaagagttgatggctggaagatgaagcaagaaaagaatgttgttccaatgagcacaggccaggctgcttctgaaagaggagctggagatattgatgctagtactgatgtgcttgtagatgattctttattgaatgatgaagctcgacagcctctttccaggaaggtttctattccatcttctaggataaatccatatcgtatggtcattatgctgcggctggttatcctttgcattttcttgcattatcggataacaaatcctgttcccaatgcatatccattgtggttggtatcagttatatgtgagatttggtttgccatatcttggatattggatcaatttcccaagtggcttcctgtaaaccgtgaaacatatcttgacaggcttgcactgaggtatgatcgggaaggagaaccgtcacaactagctgctgttgacatttttgtcagtactgttgatccattaaaggagcctccacttgtgactgccaataccgtactatctattcttgcagttgactatccagtggataaggtctcctgctatgtgtctgatgatggtgctgctatgttgacatttgaagcacttgctgagacatcggaatttgcaaggaaatgggttccttttagcaagaagtatagcattgaaccccgtgcgcctgagtggtatttttctcaaaagattgactacttgaaagataaggttcatccatcatttgtcaaggatcgtagagcaatgaagagagaatatgaggaatttaaagttcgtattaatggacttgtttcaaaggcacagaaagttcctgaagaaggatgggttatgcaagatggtaccccgtggcctggaaataacaccagagaccatccaggaatgatccaggttttcttgggccaaagtggaggacttgacactgagggtaatgaacttccacgtttagtctatgtttctcgtgaaaagcgtccagggttccaacatcacaagaaagctggtgccatgaatgcccttgttcgagtatctgcagtccttaccaatggacctttcttattgaatcttgattgtgatcactacataaacaacagcaaggccttgagggaagctatgtgctttatgatggatcccaatcttggtaaacatgtttgctatgtccagtttccgcagaggtttgacggtattgataggaatgatcgatatgccaatcgtaatacagttttctttgatataaacttgagaggtttggatggcattcaaggtcctgtttatgtgggtactggatgtgtcttcaacaggacagctttatatggttatgaacctcctcttaaacccaagcataaaaagcctgggttgttatcatcactctgtggtggaactcggaagaagagttcaaaatctagtaagaaaggatcagacaagaaaaaatctagcaagcatgttgacccaactgtgcccattttcaatttagaggatatagaagaaggagtagaaggtactggatttgatgatgagaaatcactacttatgtcacaaatgagtcttgagaaaaggtttggtcagtccgctgtctttgttgcctctacgcttatggagaatggtggtgttcctcaatctgctactccagaaactcttcttaaggaggctattcatgttatcagctgtggttacgaggataaaactgattggggaagtgagataggatggatttatggttctgtcacagaagatattcttaccggatttaagatgcatgcccggggttggcggtctatatactgcatgcctaagcgcccagcgtttaaaggttctgctcccatcaatctttcggatcgtctaaaccaagtgcttcgatgggctttaggttccgtggaaattcttttcagccgacactgtcccatctggtatggttatggtggaaggttaaagtggcttgaaaggtttgcttatgtgaacaccaccatctatccagtcactgccattccccttctcatttattgtatcttgcctgctgtctgtctgctgactaataagttcattattccacagatcagcaaccttgctagcatatggttcatctccctctttctgtccatctttgctactggaatcctggagatgaggtggagtggtgtcggaatcgacgagtggtggaggaatgaacagttttgggtcatcggtggtgtctcggcacatctctttgctgttttccaaggcttgctcaaagtgcttgctggaattgacaccaacttcactgtcacctccaaggcctcggatgaagacggagactttgccgaactatacatgttcaaatggaccacccttcttattcctccaacaacccttctcataataaacttggtgggggtggttgctggcatctcctatgccatcaacagtggctaccaatcttggggacccctctttggtaagcttttctttgcattttgggtgatcatccatctataccctttcctcaaaggtctcatggggcgccaaaacagaacaccaaccattgtggtggtgtggtccgttctgcttgcatccattttctcactcttgtgggttagaattgatccattcaccacaagggtcactggtcctgatgttgaggagtgtggcattaactgctag

SEQ ID NO: 93 - DNA, 3228 bp, Zea mays
atggcggccaacaaggggatggtggcgggctcgcacaaccgcaacgagttcgtcatgatccgccacgacggcgatgcgccgggctcggctaagcccacaaagagtgcgaatgggcaggtctgccagatttgtggtgactctgtgggtgtttcagccactggtgatgtctttgttgcctgcaatgagtgtgccttccctgtctgccgcccatgctatgagtatgagcgcaaggaggggaaccaatgctgcccccagtgcaagactagatacaagagacagaaaggtagccctcgagttcatggtgatgaggatgaggaagatgttgatgacctagacaatgaattcaactacaagcaaggcaatgggaaaggcccagagtggcaactgcaaggagatgatgctgatctgtcttcatctgctcgccatgagccacatcatcggattccacgcctgacaagcggtcaacagatatctggagagattcctgatgcttcccctgaccgtcattctatccgcagtccaacatcgagctatgttgatccaagcgtcccagttcctgtgaggattgtggacccctcgaaggacttgaattcctatgggcttaatagtgttgactggaaggaaagagttgagagctggagggttaaacaggacaaaaatatgatgcaagtgactaataaatatccagaggctagaggaggagacatggaggggactggctcaaatggagaagatatgcaaatggttgatgatgcacggctacctttgagccgtatcgtgccaatttcctcaaaccagctcaacctttaccgggtagtgatcattctccgtcttatcatcctgtgcttcttcttccagtatcgtgtcagtcatccagtgcgtaatgcttatggattatggctagtatctgttatctgcgaggtctggtttgccttgtcttggcttctagatcagttcccaaaatggtatccaatcaaccgtgagacatatcttgacaggcttgcattgaggtatgatagagagggagagccatcacagctggctcccattgatgtcttcgtcagtacagtggatccattgaaggaacctccactgatcacagccaacactgttttgtccattctttctgtggattaccctgttgacaaagtgtcatgctatgtttctgatgatggttcagctatgctgacttttgagtctctctcagaaaccgcagaatttgctagaaagtgggttcccttttgtaagaagcacaatattgaaccaagagctccagaattttactttgctcaaaaaatagattacctgaaggacaaaattcaaccttcatttgttaaggaaagacgcgcaatgaagagggagtatgaagaattcaaagtaagaatcaatgcccttgttgccaaagcacagaaagtgcctgaagaggggtggaccatggctgatggaactgcatggcctgggaataatcctagggaccatcctggcatgattcaggttttcttggggcacagtggtgggctcgacactgatggaaatgagttaccacgtcttgtctatgtctctcgtgaaaagagaccaggctttcagcatcacaagaaggctggtgcaatgaatgcgctgattcgtgtatctgctgtgctgacaaatggtgcctatcttctcaatgtggattgcgaccattacttcaatagcagcaaagctcttagagaagcaatgtgcttcatgatggatccggctctaggaaggaaaacttgttatgtacaatttccacagagatttgatggcattgacttgcacgatcgatatgctaatcggaacatagttttctttgatatcaacatgaaaggtctggatggcattcagggtccagtttacgtgggaacaggatgctgtttcaatagacaggctttgtatggatacgatcctgttttgactgaagctgatctggagccaaacattgttattaagagctgctgtggtagaaggaagaaaaagaacaagagttatatggatagtcaaagccgtattatgaagagaacagaatcttcagctcccatcttcaatatggaagacatcgaagagggtattgaaggttatgaggatgaaaggtcagtgcttatgtcccagaggaaattggagaaacgctttggtcagtctcctattttcattgcatccacctttatgacacaaggtggcataccaccttcaacaaacccagcttctctactaaaggaagctatccatgtcatcagttgtggatatgaggacaaaactgaatggggaaaagagattggctggatctatggttcagtaacggaggatattctgactgggtttaaaatgcatgcaaggggctggcaatcaatctactgcatgccaccacgaccttgtttcaagggttctgcaccaatcaatctttccgatcgtcttaatcaggtgctccgttgggctcttgggtcagtggaaattctgcttagtagacattgtcctatctggtatggttacaatggacgattgaagcttttggagaggctggcttacatcaacactattgtatatccaatcacatccattccgcttattgcctattgtgtgcttcccgctatctgcctccttaccaataaatttatcattcctgagattagcaattatgctgggatgttcttcattcttcttttcgcctccatttttgccactggtatattggagcttagatggagtggtgttggcattgaagattggtggagaaatgagcagttttgggttattggtggcacctctgcccatctcttcgcagtgttccagggtctgctgaaagtgttggctgggattgataccaacttcacagttacctcaaaggcatctgatgaggatggcgactttgctgagctatatgtgttcaagtggaccagtttgctcattcctccgaccactgttcttgtcattaacctggtcggaatggtggctggaatttcttatgccattaacagtggctaccaatcctggggtccgctctttggaaagctgttcttctcgatctgggtgatcctccatctctaccccttcctcaagggtctcatgggaaggcagaaccgcacaccaacaatcgtcattgtctggtccatccttcttgcatctatcttctccttgctgtgggtgaagatcgatcctttcatctccccgacacagaaagctgctgccttggggcaatgtggcgtcaactgctga

SEQ ID NO: 94 - DNA, 3225 bp, Zea mays
atggcggccaacaaggggatggtggcaggctctcacaaccgcaacgagttcgtcatgatccgccacgacggcgacgcgcctgtcccggctaagcccacgaagagtgcgaatgggcaggtctgccagatttgtggcgacactgttggcgtttcagccactggtgatgtctttgttgcctgcaatgagtgtgccttccctgtctgccgcccttgctatgagtacgagcgcaaggaagggaaccaatgctgccctcagtgcaagactagatacaagagacagaaaggtagccctcgagttcatggtgatgatgaggaggaagatgttgatgacctggacaatgaattcaactataagcaaggcaatgggaagggcccagagtggcagcttcaaggagatgacgctgatctgtcttcatctgctcgccatgacccacaccatcggattccacgccttacaagtggacaacagatatctggagagatccctgatgcatcccctgaccgtcattctatccgcagtccaacatcgagctatgttgatccaagcgttccagttcctgtgaggattgtggacccctcgaaggacttgaattcctatgggcttaatagtgttgactggaaggaaagagttgagagctggagggttaaacaggacaaaaatatgttgcaagtgactaataaatatccagaggctagaggagacatggaggggactggctcaaatggagaagatatgcaaatggttgatgatgcacgcctacctttgagccgcattgtgccaatttcctcaaaccagctcaacctttaccggatagtaatcattctccgtcttatcatcctgtgcttcttcttccaatatcgtatcagtcatccagtgcgtaatgcttatggattgtggctagtatctgttatctgtgaggtctggtttgccttgtcctggcttctagatcagttcccaaaatggtatccaatcaaccgtgagacatatctcgacaggcttgcattgaggtatgatagagagggagagccatcacagctggctcccattgatgtctttgtcagtacagtggatccattgaaggaacctccactgatcacagccaacactgttttgtccattcttgctgtggattaccctgttgacaaagtgtcatgctatgtttctgatgatggctcagctatgctgacttttgagtctctctctgaaactgccgaatttgctagaaagtgggttcccttttgtaagaagcacaatattgaaccaagagctccagaattttactttgctcaaaaaatagattacctgaaggacaaaattcaaccttcatttgttaaggaaagacgagcaatgaagagagagtatgaagaattcaaaataagaatcaatgcccttgttgccaaagcacagaaagtgcctgaagaggggtggaccatggctgatggaactgcttggcctgggaataaccctagggaccatcctggcatgattcaggtgttcttggggcacagtggtgggcttgacactgatggaaatgaattaccacgtcttgtctatgtctctcgtgaaaagagaccaggctttcagcatcacaagaaggctggtgcaatgaatgcactgattcgtgtatctgctgtgctgacaaatggtgcctatcttctcaatgtggattgtgaccattacttcaatagcagcaaagctcttagagaagcaatgtgcttcatgatggatccagctctaggaaggaaaacttgttatgtacaatttccacaaagatttgatggcattgacttgcacgatcgatatgctaataggaacatagtcttctttgatatcaacatgaaaggtctagatggcattcagggtccagtctatgtgggaacaggatgctgtttcaataggcaggctttgtatggatatgatcctgttttgactgaagctgatctggaacctaacattgttgttaagagctgctgtggtagaaggaagagaaagaacaagagttatatggatagtcaaagccgtattatgaagagaacagaatcttcagctcccatctttaacatggaagacatcgaggagggtattgaaggttatgaggatgaaaggtcagtgcttatgtcccagaggaaattggagaaacgctttggtcagtctccaatcttcattgcatccacctttatgactcaaggtggcataccaccttcaacaaacccagcttctctactgaaggaagctatccatgttatcagctgtgggtacgaggacaaaactgaatggggaaaagagattggctggatctatggttcagttacagaggatattctgactgggtttaaaatgcatgcaagaggctggcaatcaatctactgcatgccaccacgaccttgtttcaagggttctgcaccaatcaatctttctgatcgtcttaatcaggtgctccgttgggctcttgggtcagtggaaattctgcttagcagacattgtcctatatggtatggctacaatgggcgattgaagcttttggagaggctggcttacattaacaccattgtttatccaatcacatctgttccgcttatcgcctattgtgtgcttcctgctatctgtcttcttaccaataaatttatcattcctgagattagtaattatgctggaatgttcttcattcttctttttgcctccattttcgcaactggtatattggagctcagatggagtggtgttggcattgaagattggtggagaaatgagcagttttgggttattggtggcacctctgcccatctcttcgcggtgttccagggtctgctgaaagtgttggctgggattgataccaacttcacagttacctcaaaggcatctgatgaggatggcgactttgctgagctatatgtgttcaagtggaccagtttgctcatccctccgaccactgttcttgtcattaacctggtcggaatggtggcaggaatttcgtatgccattaacagcggctaccaatcctggggtccgctctttggaaagctgttcttctcgatctgggtgatcctccatctctaccccttcctcaagggtctcatgggcaggcagaaccgcacgccaacaatcgtcatcgtttggtccatcctccttgcgtctatcttctccttgctgtgggtgaagatcgatcctttcatctccccgacacagaaagctgccgccttggggcaatgtggtgtgaactgctga

SEQ ID NO: 95 - DNA, 3240 bp, Zea mays
atggagggcgacgcggacggcgtgaagtcggggaggcgcgggggagggcaggtgtgccagatctgcggcgatggcgtgggcactacggcggagggagacgtcttcaccgcctgcgacgtctgcgggttcccggtgtgccgcccctgctacgagtacgagcgcaaggacggcacacaagcgtgcccccagtgcaaaaacaagtacaagcgccacaaggggagtccagcgatccgaggggaggaaggagacgatactgatgccgatgatgctagcgacttcaactaccctgcatctggcaatgacgaccagaagcagaagattgctgacaggatgcgcagctggcgcatgaatgctgggggcagcggggatgttggccgccccaagtatgacagtggtgagatcgggcttaccaagtacgacagtggtgagatccctcggggatacatcccgtcagtcactaacagccagatttcgggagaaatccctggtgcttcccctgaccatcatatgatgtctcctactgggaacattggcaggcgcgccccatttccctatatgaatcattcatcaaatccgtcgagggaattctctggtagcgttgggaatgttgcctggaaagagagggttgatggctggaaaatgaagcaggacaagggaacaattcccatgacgaatggcacaagcattgctccctctgagggccggggtgttggtgatattgatgcatcaactgattacaacatggaagatgccttattaaacgatgaaactcgccagcctctatctaggaaagttccacttccttcctccaggataaatccatacaggatggtcattgtgctacgattgattgttctaagcatcttcttgcactaccggatcacaaatcctgtgcgtaatgcatacccactgtggcttctatctgttatatgtgagatctggtttgctctttcctggatattggatcagtttccaaagtggtttccaatcaaccgcgagacttaccttgatagactcgcattaaggtatgaccgggaaggtgagccatctcagttggctgctgttgacatttttgtcagtactgtcgacccaatgaaggagcctcctcttgtcactgccaataccgtgctatccattctcgctgtggactatcctgtggataaggtctcttgctatgtatctgatgatggagctgctatgctgacatttgatgcactagctgagacttcagagtttgctagaaaatgggtgccatttgttaagaagtacaacattgaacctagagctcctgaatggtacttctcccagaaaattgattacttgaaggacaaagtgcacccttcatttgttaaagaccgccgggccatgaagagagaatatgaagaattcaaaattagggtaaatggccttgttgctaaggcacaaaaagtccctgaggaaggatggatcatgcaagatggcacaccatggccaggaaacaataccagggaccatcctggaatgattcaggttttccttggtcacagtggtggtcttgatactgagggtaatgagctaccccgtttggtctatgtttctcgtgaaaaacgtcctggattccagcatcacaagaaagctggtgccatgaatgctcttgtccgcgtctcagctgtgcttaccaatggacaatacatgttgaatcttgattgtgatcactacatcaacaacagtaaggctctcagggaagctatgtgcttccttatggatcctaacctaggaaggagtgtctgctatgttcagtttccccagaggttcgatggtattgataggaatgatcgatatgccaacaggaacaccgtgtttttcgatattaacttgagaggtcttgatggcatccaaggaccagtttatgtgggcactggctgtgttttcaacagaacagctctatatggttatgagcccccaattaagcaaaagaagggtggtttcttgtcatcactatgtggtggcaggaagaagggaagcaaatcaaagaagggctcagacaagaaaaagtcacagaagcatgtggacagttctgtgccagtattcaatcttgaagatatagaggagggagttgaaggcgctggatttgatgatgagaaatcacttcttatgtctcaaatgagcttggagaagagatttggccaatctgcagcttttgttgcgtccactctgatggaatatggtggtgttcctcagtctgcgactccagaatctcttctgaaagaagctatccatgtcataagttgtggctacgaggacaagactgaatggggaactgagattgggtggatctatggttctgtgacggaagatattctcactgggttcaagatgcacgcacgaggctggcggtcgatctactgcatgcctaagcggccggccttcaagggatcggctcccatcaatctctcagaccgtctgaaccaggtgctccggtgggctctcggttcagtggaaatccttttcagccggcattgccccctatggtacggctacggaggacgcctgaagttcttggagagattcgcctacatcaacaccaccatctacccgctcacgtccctcccgctcctcatttactgtatcctgcctgccatctgcctgctcacggggaagttcatcatcccagagatcagcaacttcgctagtatctggttcatctctctcttcatctcgatcttcgccacgggtatcctggagatgaggtggagcggcgtgggcatcgacgagtggtggaggaacgagcagttctgggtcatcggaggcatctccgcccacctcttcgccgtcttccagggcctcctcaaggtgcttgccggcatcgacaccaacttcaccgtcacctccaaggcctcggatgaagacggcgacttcgcggagctgtacatgttcaagtggacgacacttctgatcccgcccaccaccatcctgatcatcaacctggtcggcgttgttgccggcatctcctacgccatcaacagcgggtaccagtcgtggggtccgctcttcggcaagctcttcttcgccttctgggtgatcgttcacctgtacccgttcctcaagggtctcatgggtcggcagaaccgcaccccgaccatcgtggttgtctgggcgatcctgctggcgtcgatcttctccttgctgtgggttcgcatcgatccgttcaccacccgcgtcactggcccggatactcgaacgtgtggcatcaactgctag

SEQ ID NO: 96 - DNA, 3234 bp, Zea mays
atggagggcgacgcggacggcgtgaagtcggggaggcgcggtggcggacaggtgtgccagatctgcggcgacggcgtgggcaccacggcggagggggacgtcttcgccgcctgcgacgtctgcgggtttccggtgtgccgcccctgctacgagtacgagcgcaaggacggcacgcaggcgtgcccccagtgcaagaccaagtacaagcgccacaaggggagcccggcgatccgtggggaggaaggagacgacactgatgccgatagcgacttcaactaccctgcatctggcaatgaagaccagaagcagaagattgccgacagaatgcgcagctggcgcatgaacgctgggggcagcggggatgttggtcgccccaagtatgacagtggcgagatcgggcttaccaagtatgacagtggcgagatccctcggggatacatcccatcagtcactaacagccagatctcaggagaaatccctggtgcttcccctgaccatcatatgatgtccccaactgggaacattggcaagcgtgctccatttccctatgtgaaccattcgccaaatccgtcaagggagttctctggtagcattgggaatgttgcctggaaagagagggttgatggctggaaaatgaagcaggacaaggggacgattcccatgacgaatggcacaagcattgctccctctgagggtcggggtgttggtgatattgatgcatcaactgattacaacatggaagatgccttattgaacgacgaaactcgacagcctctatctaggaaagttccacttccttcctccaggataaatccatacaggatggtcattgtgctgcgattgattgttctaagcatcttcttgcactaccgtatcacaaatcctgtgcgcaatgcatacccattatggcttctatctgttatatgtgagatctggtttgctctttcgtggatattggatcagttccctaagtggtttccaatcaaccgggagacgtaccttgataggctggcattaaggtatgaccgggaaggtgagccatctcagttggctgctgttgacattttcgtcagtacagtcgacccaatgaaggagcctcctcttgtcactgccaataccgtgctatccattcttgctgtggattaccctgtggataaggtctcttgctatgtatctgatgatggagctgcgatgctgacatttgatgcactagctgagacttcagagtttgctagaaaatgggtaccatttgttaagaagtacaacattgaacctagagctcctgaatggtacttctcccagaaaattgattacttgaaggacaaagtgcacccttcatttgttaaagaccgccgggccatgaagagagaatatgaagaattcaaagttagggtaaatggccttgttgctaaggcacagaaagttcctgaggaaggatggatcatgcaagatggcacaccatggccaggaaacaataccagggaccatcctggaatgattcaggttttccttggtcacagtggtggccttgatactgagggcaatgagctaccccgtttggtctatgtttctcgtgaaaagcgtcctggattccagcatcacaagaaagctggtgccatgaatgctcttgttcgtgtctcagctgtgcttaccaatggacaatacatgttgaatcttgattgtgatcactacattaacaacagtaaggctctcagggaagctatgtgcttccttatggaccctaacctaggaaggagtgtctgctacgtccagtttccccagagattcgatggcattgacaggaatgatcgatatgccaacaggaacaccgtgtttttcgatattaacttgagaggtcttgatggcatccaaggaccagtttatgtcggaactggctgtgttttcaaccgaacagctctatatggttatgagcccccaattaagcagaagaagggtggtttcttgtcatcactatgtggcggtaggaagaaggcaagcaaatcaaagaagggctcggacaagaagaagtcgcagaagcatgtggacagttctgtgccagtattcaaccttgaagatatagaggagggagttgaaggcgctggatttgacgacgagaaatcacttcttatgtctcaaatgagcctggagaagagatttggccagtccgcagcgtttgttgcctccactctgatggagtatggtggtgttcctcagtccgcaactccggagtctcttctgaaagaagctatccatgttataagctgtggctatgaggacaagactgaatggggaactgagatcgggtggatctacggttctgtgacagaagacattctcaccggattcaagatgcacgcgcgaggctggcggtcgatctactgcatgcccaagcggccagctttcaaggggtctgcccccatcaatctttcggaccgtctgaaccaggtgctccggtgggctcttgggtccgtggagatcctcttcagccggcactgccccctgtggtacggctacggagggcggctcaagttcctggagagattcgcgtacatcaacaccaccatctacccgctcacgtccatcccgcttctcatctactgcatcctgcccgccatctgtctgctcaccggaaagttcatcattccagagatcagcaacttcgccagcatctggttcatctccctcttcatctcgatcttcgccacgggcatcctggagatgaggtggagcggggtgggcatcgacgagtggtggaggaacgagcagttctgggtgatcgggggcatctccgcgcacctcttcgccgtgttccagggcctgctcaaggtgctggccggcatcgacaccaacttcaccgtcacctccaaggcctcggacgaggacggcgacttcgcggagctgtacatgttcaagtggacgacgctcctgatcccgcccaccaccatcctgatcatcaacctggtcggcgtcgtcgccggcatctcctacgccatcaacagcggataccagtcgtggggcccgctcttcggcaagctcttcttcgccttctgggtcatcgtccacctgtacccgttcctcaagggcctcatgggcaggcagaaccgcaccccgaccatcgtcgtcgtctgggccatcctgctggcgtccatcttctccttgctgtgggttcgcatcgaccccttcaccacccgcgtcactggcccggatacccagacgtgtggcatcaactgctag

SEQ ID NO: 97 - DNA, 3231 bp, Oryza sativa
atggcggcgaacgcggggatggtggcgggatcccgcaaccggaacgagttcgtcatgatccgccccgacggcgacgcgccaccgccggctaagccagggaagagtgtgaatggtcaggtctgccagatttgtggcgacactgttggcgtctcggccaccggcgacgtctttgttgcctgcaatgagtgcgccttcccggtctgccgcccttgctacgagtacgagcgcaaggaagggaaccagtgctgcccccagtgcaagactagatacaagaggcacaaaggtagccctagagttcagggcgatgaggaggaggaagatgttgatgacctggacaatgaattcaattataagcatggcaatggcaaaggtccagagtggcagatacagagacagggggaagatgttgacctgtcttcatcttctcgccacgaacaacatcggattccccgtctgacaagtgggcaacagatctcaggagagatccctgatgcttcccccgatcgccattctatccgcagcggaacatcaagctatgttgatccaagtgttccagttcctgtgaggattgtggacccctccaaggacttgaattcctatgggattaacagtgttgactggcaagaaagagttgccagctggaggaacaagcaggacaaaaatatgatgcaggtagctaataaatatccagaggcaagagggggagacatggaagggactggttcaaatggtgaagatatgcaaatggttgatgatgcacgtctacctctgagccgcatagtgcctatcccttcaaaccagctcaacctttaccggattgttatcattctccgtcttatcatcctgatgttcttcttccaatatcgtgtcactcatccagtgcgggatgcttatggattgtggctagtatctgttatctgtgaaatttggtttgccttatcctggctcctagatcaattcccaaagtggtacccgataaaccgtgaaacataccttgacaggcttgcattgagatatgatagggagggagagccatcacagcttgctcccattgatgtctttgtcagtacggtggatccactaaaggaacctcctctgatcacagcaaacactgttttgtccattctggctgtggattaccctgttgacaaagtgtcatgctatgtttctgacgatggttcagctatgttaacttttgaggctctgtcagaaactgcagaatttgctaggaagtgggttccgttttgcaagaagcacaatattgaaccacgagctccagagttttactttgctcaaaaaatagattacctgaaggacaaaatccaaccttcctttgttaaagaaaggcgggcaatgaagagagagtatgaagaattcaaggtacggatcaatgctcttgttgcgaaggcacaaaaagtacctgaagaggggtggaccatggctgatggcactgcttggcctgggaataacccaagggatcaccctggcatgattcaggtgttcttggggcacagtggtgggcttgacactgatggtaacgagttgccacggcttgtctacgtctctcgtgaaaagaggccaggattccagcatcacaagaaggctggtgcaatgaatgcattgattcgtgtatctgctgtgctgacaaatggtgcctatcttctcaatgtggattgtgatcactacttcaacagtagcaaagctcttagagaagcaatgtgcttcatgatggatcccgcactaggaaggaaaacttgttatgttcagttcccacaaagatttgatggcattgacttgcacgatcgatacgctaatcgcaacatagtcttctttgatattaacatgaaaggtttagatggcattcagggtccagtttatgtgggaacaggttgctgcttcaataggcaggccttgtatggctatgatcctgtactaactgaggctgatttggaacctaacattgttgttaagagctgctgtggtggcagaaagaaaaagagcaagagctacatggatagcaaaaaccgtatgatgaagagaacagagtcttcagctcctatctttaacatggaagatatagaagagggcattgaaggttatgaagatgaaaggtcagtgctgatgtcccagaagagattagagaaacgttttggtcaatcgccaatttttattgcgtccaccttcatgactcaaggaggcataccaccctcaacgaacccagcatctctactgaaggaagccatccatgttatcagttgtggatatgaggacaaaactgaatggggaaaagagattggctggatctatggttcagttactgaggatattctgactggatttaaaatgcacgcaagaggttggatatcaatctattgcatgccaccacggccatgcttcaagggttctgcgccaatcaatctgtctgatcgtcttaaccaagtgctacgttgggctcttgggtctgttgagattctgcttagcagacattgtcctatctggtatggttacaatgggcgtttgaaacttctggagaggctggcttacattaacaccattgtttatccaattacatccattccacttatcgcctattgtgtgcttcctgctatctgtctcctcaccaacaaatttatcattcctgagattagcaattatgctgggatgttctttattctgcttttcgcctccattttcgcaactggtattctggagctccgatggagtggtgttggtatcgaggactggtggagaaatgaacagttctgggtcattggtggcacatctgcccatctcttcgctgtgttccagggtcttctgaaagtgttagcaggaattgataccaacttcactgttacctcaaaggcgtccgatgaggatggtgactttgctgagctatacgtgttcaagtggaccagtctcctcattcccccgaccaccgtgcttgtcatcaacctggtgggcatggtggcgggtatatcatatgccattaacagcggttaccaatcatggggtcctctctttggaaagctcttcttctccatctgggtgatcctccatctctaccccttcctcaagggtctcatgggcaggcagaaccgcactccgaccatcgtcatcgtctggtcgatcctcctcgcgtcgatcttctcccttctgtgggtcaagatcgatcctttcatttcgcctactcagaaagccgtcgccttggggcaatgcggtgtgaactgctga

SEQ ID NO: 98 - DNA, 3246 bp, Oryza sativa
atggacggcgacgcggatgccgtgaagtcggggaggcacgggagcgggcaggcgtgccagatctgcggcgacggcgtgggcacgacggcggagggcgacgtgttcgccgcctgcgacgtctgcggcttcccggtgtgccgcccctgctacgagtacgagcgcaaggatggcacccaggcttgcccccagtgcaagaccaagtacaagcgccacaaggggagcccggcgatccgtggggaggaaggcgaggatactgatgctgatgatgtcagtgactacaactaccctgcatctggcagtgccgaccagaagcagaagattgctgataggatgcgcagttggcgcatgaatgctgggggtggtggagacgtcggccgtcccaagtatgacagtggcgagatcgggctcaccaagtatgacagtggcgagatccctcggggatacatcccttcagtcactaatagccagatctcgggagaaatccctggagcttcccctgatcatcatatgatgtctcctaccggaaacattggcaagcgtgctccattcccctatgtgaaccattcaccaaatccatcaagggagttctctggcagcattggaaatgttgcctggaaagaaagagttgatggctggaaactgaagcaggacaagggagcaattcccatgaccaacgggacaagcattgccccttctgaaggtcggggagttggtgatatcgatgcatccactgattacaatatggaagatgccttactgaatgatgaaactcgccagcctctctctagaaaagttccccttccttcatccagaataaatccctacagaatggtcattgttctgcgtttggttgttctaagcattttccttcactaccgtattacgaatcctgtgcgcaatgcgtatccgctctggcttttatctgttatatgtgagatttggtttgctttgtcctggatattggatcagttcccgaagtggtttccaatcaaccgtgaaacctaccttgataggctggcattgaggtatgacagagaaggtgagccatctcagttggctgctgttgacatttttgtcagtacagtcgaccccatgaaggaacctcctcttgttactgccaataccgtgctgtccattcttgctgttgattacccagtggacaaggtctcttgctatgtatctgacgatggtgctgcaatgctgacttttgatgcattggctgagacttcagagtttgctagaaagtgggttccattcgttaagaagtataacattgagccaagagctcctgagtggtacttctcccagaaaatcgattacttgaaagacaaagtccacccttcatttgttaaagaccgtcgtgccatgaagagagaatatgaagaattcaaagttaggataaatggccttgttgctaaggcacagaaagtcccggaggagggatggatcatgcaagatggcacaccatggccaggaaacaatactagggaccatcctggaatgattcaggttttccttggtcacagtggtggccttgataccgagggtaatgagcttccccgcctggtctacgtatctcgtgagaagcgtcctgggtttcagcaccacaagaaggctggtgccatgaatgctcttgttcgtgtctcagctgtgcttaccaatggacagtacatgttgaatcttgattgtgatcactacatcaacaacagcaaggctctgcgggaagctatgtgcttccttatggatccaaacctaggaaggagtgtctgttatgttcagttcccacaaaggttcgatggtattgataggaatgatcgatatgcgaacaggaacactgtgtttttcgatattaacttgaggggtcttgatggcatccaaggaccagtttatgtgggaactggttgtgtattcaacagaactgctctatatggttatgaacccccaattaagcagaagaagaagggaagtttcttgtcatcactatgtgggggcaggaagaaggcaagcaagtcaaagaagaagagttcggacaagaagaagtcaaacaagcacgtggacagtgctgtgccagttttcaatcttgaagatatagaggagggtgttgaaggtgctggattcgatgatgagaaatcacttcttatgtctcaaatgagcttggagaagagatttggccagtctgcagcgtttgttgcctccactctcatggaatatggtggtgttcctcaatctgcaaccccagaatctcttttgaaagaagctatccatgtgataagttgtggctatgaggacaagaccgaatggggaactgagattgggtggatctacggttccgtgacagaagatattctcactggattcaagatgcatgcgcgaggctggagatcaatctactgcatgcccaagcgcccagctttcaaggggtctgctcctatcaatctttcagatcgtcttaaccaagtgcttcggtgggcacttggttctgttgaaattcttttcagtcgccattgtcccatatggtacggctatggaggacgccttaagttcttggagagatttgcctacatcaacaccactatttatccattgacatcgatcccgcttctcatatactgtgttttgcctgctatctgtttgctcactgggaagttcatcatcccagagattagcaactttgctagtatttggttcatctctctcttcatttcaatttttgccactggtatccttgagatgaggtggagtggtgttggcatcgatgagtggtggaggaatgaacagttctgggttattggaggtatatctgcgcatctttttgccgtcttccagggtctcctcaaggtgcttgctggtatcgacaccaatttcactgtcacctcaaaggcttctgatgaagatggcgactttgctgagctctacatgttcaagtggacaacgcttctcatcccaccgacgaccatcttgatcattaacctggtcggtgttgttgctggtatctcatacgcgatcaacagcggctaccaatcatggggaccgctctttggcaagctcttctttgccttctgggtgattgtccacttgtaccccttcctcaagggtcttatgggtcggcaaaaccgcactccgaccatcgttgttgtttgggcaatccttctggcttcgatcttctcattgctgtgggttcgcatcgatccattcaccacccgtgtcaccggcccagatacccaaacatgtggcatcaactgctaa

SEQ ID NO: 99 - protein, 34 aa, Arabidopsis
  VARIANT (2)..(2): / replace = "Gly", "Met", or "Ser"
  VARIANT (3)..(3): / replace = "Val", "Lys", or "Ile"
  VARIANT (5)..(5): / replace = "Phe"
  VARIANT (6)..(6): / replace = "His" or "Arg"
  VARIANT (9)..(9): / replace = "Val", "Cys" or "Ile"
  VARIANT (10)..(10): / replace = "Ser", "Met" or "Leu"
  VARIANT (11)..(11): / replace = "Asn",
  VARIANT (13)..(13): / replace = "Ala",
  VARIANT (14)..(14): / replace = "Asn", "Pro", "Arg", "Thr", or "Glu"
  VARIANT (15)..(15): / replace = "Asp"
  VARIANT (17)..(17): / replace = "Phe"
  VARIANT (18)..(18): / replace = "Gly", "Ala", or "Thr"
  VARIANT (22)..(22): / replace = "Val", "Ile", or "Leu"
  VARIANT (28)..(28): / replace = "Val"
  VARIANT (32)..(32): / replace = "Leu", "Ile", "Val", or "Met"
LCFFLQYRTTHPVKNAYPLWLTSVICEIWFAFSW

SEQ ID NO: 100 - protein, 34 aa, Arabidopsis; identical to SEQ ID NO: 99

SEQ ID NO: 101 - protein, 34 aa, Arabidopsis; identical to SEQ ID NO: 99

SEQ ID NO: 102 - protein, 34 aa, Arabidopsis
  VARIANT (3)..(3): / replace = "Thr", "Val", "Met", "Ser", or "Ala
  VARIANT (7)..(7): / replace = "Val", or "Ile
  VARIANT (10)..(10): / replace = "Leu", or "Phe"
  VARIANT (12)..(12): / replace = "Asn", or "Gly"
  VARIANT (13)..(13): / replace = "Lys", "Thr", or Gln"
  VARIANT (16)..(16): / replace = "Val", or "Thr"
  VARIANT (18)..(18): / replace = "Ala", "Gln", or "Lys"
  VARIANT (19)..(19): / replace = "Leu"
  VARIANT (20)..(20): / replace = "Asn", or "Thr"
  VARIANT (22)..(22): / replace = "Phe", "Leu", "Ile", or "Ala"
  VARIANT (23)..(23): / replace = "Glu"
  VARIANT (24)..(24): / replace = "Gly"
  VARIANT (25)..(25): / replace = "Met", "Leu", "Ala", or "Val"
  VARIANT (26)..(26): / replace = "Cys", "Phe", "Leu", "Val", or "Ile"
  VARIANT (28)..(28): / replace = "Met", "Leu", or "Val"
  VARIANT (29)..(29): / replace = "Ser"
  VARIANT (30)..(30): / replace = "Ser" or "Ala"
  VARIANT (32)..(32): / replace = "Val", "Ala", "Leu", "Ser", "Met" or "Gly"
  VARIANT (33)..(33): / replace = "Cys"
YCILPAFCLITDRFIIPEISNYASIWFILLFISI

SEQ ID NO: 103 - protein, 34 aa, Arabidopsis; identical to SEQ ID NO: 102

SEQ ID NO: 104 - protein, 34 aa, Arabidopsis; identical to SEQ ID NO: 102

SEQ ID NO: 105 - protein, 32 aa, Arabidopsis
  VARIANT (5)..(5): / replace = "Thr", "Val", "Ile", or "Ala"
  VARIANT (7)..(7): / replace = "Ser"
  VARIANT (9)..(9): / replace = "Phe"
  VARIANT (10)..(10): / replace = "Leu"
  VARIANT (12)..(12): / replace = "Leu"
  VARIANT (13)..(13): / replace = "Val"
  VARIANT (14)..(14): / replace = "Leu"
  VARIANT (16)..(16): / replace = "Ile", or "Met"
  VARIANT (17)..(17): / replace = "Phe"
  VARIANT (20)..(20): / replace = "Phe" or "Ile"
  VARIANT (23)..(23): / replace = "Val"
  VARIANT (24)..(24): / replace = "Asn", "Ser", "Glu", or "Lys"
  VARIANT (26)..(26): / replace = "Ser",
  VARIANT (28)..(28): / replace = "Ile",
  VARIANT (30)..(30): / replace = "Ala",
VIGGTSAHLFAVFQGLLKVLAGIDTNFTVTSK

SEQ ID NO: 106 - protein, 33 aa, Arabidopsis
VIGGTSAHLFAVFQGLLKVLAGIDTNFTVTSKA

SEQ ID NO: 107 - protein, 33 aa, Arabidopsis; identical to SEQ ID NO: 106

SEQ ID NO: 108 - protein, 35 aa, Arabidopsis
  VARIANT (2)..(2): / replace = "Ile"
  VARIANT (3)..(3): / replace = "Ser"
  VARIANT (4)..(4): / replace = "Asn"
  VARIANT (6)..(6): / replace = "Phe"
  VARIANT (7)..(7): / replace = "Asp" or "Glu"
  VARIANT (13)..(13): / replace = "Met" or "Leu"
  VARIANT (15)..(15): / replace = "Arg"
  VARIANT (17)..(17): / replace = "Leu"
  VARIANT (19)..(19): / replace = "Ser"
  VARIANT (20)..(20): / replace = "Ile" or "Phe"
  VARIANT (23)..(23): / replace = "Val"
  VARIANT (24)..(24): / replace = "Val", "Ile", or "Leu"
  VARIANT (33)..(33): / replace = "Met" or "Val"
  VARIANT (34)..(34): / replace = ""Met", "Val", or "Ile"
AVNSGYQSWGPLFGKLFFALWVIAHLYPFLKGLLG

SEQ ID NO: 109 - protein, 35 aa, Arabidopsis; identical to SEQ ID NO: 108

SEQ ID NO: 110 - protein, 35 aa, Arabidopsis; identical to SEQ ID NO: 108

SEQ ID NO: 111 - protein, 14 aa, Arabidopsis
  VARIANT (1)..(1): / replace = "Ala"
  VARIANT (2)..(2): / replace = "Met" or "Val"
  VARIANT (3)..(3): / replace = "Ile"
  VARIANT (4)..(4): / replace = "Ser " or "Val"
  VARIANT (6)..(6): / replace = "Ile" or "Phe"
  VARIANT (8)..(8): / replace = "Thr", "Asp", or "Asn"
  VARIANT (10)..(10): / replace = "Ile"
  VARIANT (11)..(11): / replace = "Ser"
  VARIANT (12)..(12): / replace = "Asn"
  VARIANT (14)..(14): / replace = "Phe"
GVVAGVSYAINSGY

SEQ ID NO: 112 - protein, 14 aa, Arabidopsis
GVVAGVSYAINSGY

SEQ ID NO: 113 - protein, 14 aa, Arabidopsis
GVVAGVSYAINSGY

SEQ ID NO: 114 - protein, 22 aa, Arabodopsis
  VARIANT (1)..(1): / replace = "Ile"
  VARIANT (2)..(2): / replace = "Val" or "Leu"
  VARIANT (5)..(5): / replace = "Ala"
  VARIANT (6)..(6): / replace = "Ile" or "Ala"
  VARIANT (8)..(8): / replace = "Ile"
  VARIANT (9)..(9): / replace = "Ser"
  VARIANT (11)..(11): / replace = "Phe"
  VARIANT (12)..(12): / replace = "Leu"
  VARIANT (13)..(13): / replace = "Thr"
  VARIANT (14)..(14): / replace = "Val"
  VARIANT (15)..(15): / replace = "Met"
  VARIANT (18)..(18): / replace = "Lys"
  VARIANT (19)..(19): / replace = "Val"
  VARIANT (20)..(20): / replace = "Asp"
  VARIANT (20)..(20): / replace = "Asn"
VVVWSVLLASIFSLLWVRIDPF

SEQ ID NO: 115 - protein, 22 aa, Arabidopsis
VVVWSVLLASIFSLLWVRIDPF

SEQ ID NO: 116 - protein, 22 aa, Arabidopsis
VVVWSVLLASIFSLLWVRIDPF

SEQ ID NO: 117 - protein, 18 aa, Arabidopsis
  VARIANT (3)..(3): / replace = "Phe"
  VARIANT (4)..(4): / replace = "Phe" or "Met"
  VARIANT (6)..(6): / replace = "Lys", or "Asn"
  VARIANT (10)..(10): / replace = "Leu"
  VARIANT (15)..(15): / replace = "Thr",  "Asn", "Ser", or "Gly"
  VARIANT (16)..(16): / replace = "Cys"
  VARIANT (17)..(17): / replace = "Lys" or "Gly"
EILFSRHCPIWYGYNGRL

SEQ ID NO: 118 - protein, 18 aa, Arabidopsis
EILFSRHCPIWYGYNGRL

SEQ ID NO: 119 - protein, 18 aa, Arabidopsis
EILFSRHCPIWYGYNGRL

SEQ ID NO: 120 - protein, 14 aa, Arabidopsis
  VARIANT (1)..(1): / replace = "Leu"
  VARIANT (9)..(9): / replace = "Thr"
  VARIANT (11)..(11): / replace = "Met" or "Leu"
  VARIANT (13)..(13): / replace = "Ile" or "Leu"
FKWTALLIPPTTVL

SEQ ID NO: 121 - protein, 14 aa, Arabidopsis
FKWTALLIPPTTVL

SEQ ID NO: 122 - protein, 14 aa, Arabidopsis
FKWTALLIPPTTVL

1. A plant or plant part comprising a polynucleotide encoding a mutated cellulose synthase (CESA) polypeptide, a variant thereof, the expression of said polynucleotide confers to the plant or plant part tolerance to CESA-inhibiting herbicides, wherein the variant comprises on or more of the following motifs:

| | |
|---|---|
| i) | Motif 1a: |

(SEQ ID NO: 102)
L[C/G/M/S][F/V/L/I]F[L/F][Q/H/R]YR[T/V/C/I]
[T/S/M/L][H/N]P[V/A][K/N/P/R/T/E][N/D]A[Y/F]
[P/G/A/T]LWL[T/V/I/L]SVICE[I/V]WFA[F/L/I/V/M]
SW
wherein the amino acid at position 8, and/or 23 within said motif of the corresponding wildtype sequence is substituted by any other amino acid
ii) Motif 2a:
(SEQ ID NO: 102)
YC[I/T/V/M/S/A]LPA[F/V/I]CL[I/L/F]T[D/N/G][R/K/T/Q]
FI[I/V/T]P[E/A/Q/K][I/L][S/N/T]N[Y/F/L/I/A][A/E]
[S/G][I/M/L/A/V][W/C/F/L/V/I]F[I/M/L/V][L/S][L/S/A]
F[I/V/A/L/S/M/G[[S/C]I
wherein the amino acid at position 4, 17, and/or 24 within said motif of the corresponding wildtype sequence is substituted by any other amino acid
iii) Motif 3a:
(SEQ ID NO: 105)
VIGG[T/V/I/A]S[A/S]H[L/F][F/L]A[V/L][F/V][Q/L]G
[L/I/M][L/F]KV[L/F/I]AG[I/V][D/N/S/E/K]T[N/S]F
[T/I]V[T/A]SK
wherein the amino acid at position 1, 3, 18, and/or 28 within said motif of the corresponding wildtype sequence is substituted by any other amino acid
iv) Motif 4a:
(SEQ ID NO: 108)
A[V/I][N/S][S/N]G[Y/F][Q/D/E]SWGPL[F/M/L]G[K/R]L
[F/L]F[A/S][L/I/F]WV[I/V][A/V/I/L]HLYPFLKG[L/M/V]
[L/M/V(I]G
wherein the amino acid at position 9, 12, 13, 15, 19, and/or 24 within said motif of the corresponding wildtype sequence is substituted by any other amino acid
v) Motif 5a:
(SEQ ID NO: 111)
[G/A][I/M/V][V/][A/S/V]G[V/I/F]S[Y/T/D/N]A[V/I]
[N/S][S/N]G[Y/F]
wherein the amino acid at position 8 within said motif of the corresponding wildtype sequence is substituted by any other amino acid
vi) Motif 6a:
(SEQ ID NO: 114)
[V/I][I/V/L]VW[S/A][V/I/A]L[L/I][A/S]S[I/F][F/L]
[S/T][L/V][L/M]WV[R/K][I/V][N/D]PF
wherein the amino acid at position 9, 11, 12, and/or 14 within said motif of the corresponding wildtype sequence is substituted by any other amino acid
vii) Motif 7a:
(SEQ ID NO: 117)
EI[L/F][L/F/M]S[R/K/N]HCP[I/L]WYGY[H/T/N/S/G][G/C]
[R/K/G]L
wherein the amino acid at position 5, 13, 15, and/or 16 within said motif of the corresponding wildtype sequence is substituted by any other amino acid
viii) Motif 8a:
(SEQ ID NO: 120)
[F/L]KWT[A/S/T]LLI[P/T]P[T/M/L]T[V/I/L]L
wherein the amino acid at position 10 within said motif of the corresponding wildtype sequence is substituted by any other amino acid.

2. The plant or plant part of claim 1, wherein the polynucleotide encoding the mutated CESA polypeptide comprises the nucleic acid sequence set forth in SEQ ID NO: 84, 85, 86, 87, 88, 89, 90, 91, 92, 93, 94, 95, 96, 97, or 98, or a homologue, variant or derivative thereof.

3. The plant or plant part of claim 1, wherein the mutated CESA polypeptide is a functional variant having, over the full-length of the variant, at least about 60% or more amino acid sequence identity to SEQ ID NO: 1, 2, 3, 4, 5, 6, 7, 8, 9, 10, 11, 12, 13, 14, 15, 16, 17, 18, 19, 20, 21, 22, 23, 24, 25, 26, 27, 28, 29, 30, 31, 32, 33, 34, 35, 36, 37, 38, 39, 40, 41, 42, 43, 44, 45, 46, 47, 48, 49, 50, 51, 52, 53, 54, 55, 56, 57, 58, 59, 60, 61, 62, 63, 64, 65, 66, 67, 68, 69, 70, 71, 72, 73, 74, 75, 76, 77, 78, 79, 80, 81, 82 or 83.

4. The plant or plant part of claim 1, wherein the mutated CESA refers to a CESA polypeptide comprising the sequence of SEQ ID NO: 1, an orthologue, paralogue, or homologue thereof, wherein the amino acid sequence differs from the wildtype amino acid sequence at one or more positions corresponding to positions 292, 307, 872, 885, 892, 928, 930, 45, 957, 1008, 1011, 1012, 1014, 1018, 1023, 999, 1051, 1053, 1054, 1056, 832, 840, 842, 843, 982 of SEQ ID NO: 1.

5. A seed capable of germination into a plant comprising in at least some of its cells a polynucleotide operably linked to a promoter operable in plant cells, the promoter capable of expressing a mutated CESA polypeptide encoded by the polynucleotide, the expression of the mutated CESA polypeptide conferring to the plant tolerance to CESA-inhibiting herbicides.

6. A plant cell of or capable of regenerating a plant comprising in at least some of its cells a polynucleotide operably linked to a promoter operable in plant cells, the promoter capable of expressing a mutated CESA polypeptide encoded by the polynucleotide, the expression of the mutated CESA polypeptide conferring to the plant tolerance to CESA-inhibiting herbicides, wherein the plant cell comprises the polynucleotide operably linked to a promoter.

7. A plant cell comprising a polynucleotide operably linked to a promoter operable in a cell, the promoter capable of expressing a mutated CESA polypeptide encoded by the polynucleotide, the expression of the mutated CESA polypeptide conferring to the plant tolerance to CESA-inhibiting herbicides.

8. A plant product prepared from a plant or plant part comprising in at least some of its cells cells a polynucleotide operably linked to a promoter operable in plant cells, the promoter capable of expressing a mutated CESA polypeptide encoded by the polynucleotide, the expression of the mutated CESA polypeptide conferring to the plant tolerance to CESA-inhibiting herbicides.

9. A progeny or descendant plant derived from a plant comprising in at least some of its cells a polynucleotide operably linked to a promoter operable in plant cells, the promoter capable of expressing a mutated CESA polypeptide encoded by the polynucleotide, wherein the progeny or descendant plant comprises in at least some of its cells the polynucleotide operably linked to the promoter, the expression of the mutated CESA polypeptide conferring to the progeny or descendant plant tolerance to the CESA-inhibiting herbicides.

10. A method for controlling weeds at a locus for growth of a plant, the method comprising: (a) applying an herbicide composition comprising CESA-inhibiting herbicides to the locus; and (b) planting a seed at the locus, wherein the seed is capable of producing a plant that comprises in at least some of its cells a polynucleotide operably linked to a promoter operable in plant cells, the promoter capable of expressing a mutated CESA polypeptide encoded by the polynucleotide, the expression of the mutated CESA polypeptide conferring to the plant tolerance to CESA-inhibiting herbicides, wherein the mutated CESA polypeptide comprises one or more of the following motifs:
i) Motif 1a:
(SEQ ID NO: 99)
L[C/G/M/S][F/V/L/I]F[L/F][Q/H/R]YR[T/V/C/I][T/S/M/
L][H/N]P[V/A][K/N/P/R/T/E][N/D]A[Y/F][P/G/A/T]LWL
[Y/V/I/L]SVICE[I/V]WFA[F/L/I/V/M]SW[[.]]
wherein the amino acid at position 8, and/or 23 within said motif of the corresponding wildtype sequence is substituted by any other amino acid
ii) Motif 2a:
(SEQ ID NO: 102)
YC[I/T/V/M/S/A]LPA[F/V/I]CL[I/L/F]T[D/N/G][R/K/T/
Q]FI[I/V/T]P[E/A/Q/K][I/L][S/N/T]N[Y/F/L/I/A][A/E]
[S/G][I/M/L/A/V][W/C/F/L/V/I]F[/M/L/V][L/S][L/S/A]
F[I/V/A/L/S/M/G][S/C]I
wherein the amino acid at position 4, 17, and/or 24 within said motif of the corresponding wildtype sequence is substituted by any other amino acid
iii) Motif 3a:
(SEQ ID NO: 105)
VIGG[T/V/I/A]S[A/S]H[L/F][F/L]A[V/L][F/V][Q/L]G
[L/I/M][L/F]KV[L/F/I]AG[I/V][D/N/S/E/K]T[N/S]F
[T/I]V[T/A]SK
wherein the amino acid at position 1, 3, 18, and/or 28 within said motif of the corresponding wildtype sequence is substituted by any other amino acid
iv) Motif 4a:
(SEQ ID NO: 108)
A[V/I][N/S][S/N]G[Y/F][Q/D/E]SWGPL[F/M/L]G[K/R]L
[F/L]F[A/S][L/I/F]WV[I/V][A/V/I/L]HLYPFLKG[L/M/V]
[L/M/V(I]G
wherein the amino acid at position 9, 12, 13, 15, 19, and/or 24 within said motif of the corresponding wildtype sequence is substituted by any other amino acid
v) Motif 5a:
(SEQ ID NO: 111)
[G/A][I/M/V][V/][A/S/V]G[V/I/F]S[Y/T/D/N]A[V/I]
[N/S][S/N]G[Y/F]
wherein the amino acid at position 8 within said motif of the corresponding wildtype sequence is substituted by any other amino acid
vi) Motif 6a:
(SEQ ID NO: 114)
[V/I][I/V/L]VW[S/A][V/I/A]L[L/I][A/S]S[I/F][F/L]
[S/T][L/V][L/M]WV[R/K][I/V][N/D]PF
wherein the amino acid at position 9, 11, 12, and/or 14 within said motif of the corresponding wildtype sequence is substituted by any other amino acid
vii) Motif 7a:
(SEQ ID NO: 117)
EI[L/F][L/F/M]S[R/K/N]HCP[I/L]WYGY[H/T/N/S/G][G/C]
[R/K/G]L
wherein the amino acid at position 5, 13, 15, and/or 16 within said motif of the corresponding wildtype sequence is substituted by any other amino acid
viii) Motif 8a:
(SEQ ID NO: 120)
[F/L]KWT[A/S/T]LLI[P/T]P[T/M/L]T[V/I/L]L
wherein the amino acid at position 10 within said motif of the corresponding wildtype sequence is substituted by any other amino acid.

11. The method of claim 10, wherein herbicide composition is applied to the weeds and to the plant produced by the seed.

12. The method according to claim 10, wherein the CESA-inhibiting herbicide comprises a compound having the Formula (I):

[chemical structure]

13. A method of producing a plant having tolerance to CESA-inhibiting herbicide, the method comprising regenerating a plant from a plant cell transformed with transformed with a recombinant polynucleotide operably linked to a promoter operable in plant cells, the promoter capable of expressing a mutated CESA polypeptide encoded by the polynucleotide, the expression of the mutated CESA polypeptide conferring to the plant tolerance to CESA-inhibiting herbicides.

14. A method of producing a progeny plant having tolerance to CESA-inhibiting herbicide, the method comprising: crossing a first CESA-inhibiting herbicide-tolerant plant with a second plant to produce a CESA-inhibiting herbicide-tolerant progeny plant, wherein the first plant and the progeny plant comprise in at least some of their cells a polynucleotide operably linked to a promoter operable in plant cells, the promoter capable of expressing a mutated CESA polypeptide encoded by the polynucleotide, the expression of the mutated CESA polypeptide conferring to the plant tolerance to CESA-inhibiting herbicides.

15. A plant or plant part comprising in at least some of its cells a polynucleotide operably linked to a promoter operable in plant cells, the promoter capable of expressing a mutated CESA polypeptide encoded by the polynucleotide, the expression of the mutated CESA polypeptide conferring to the plant tolerance to CESA-inhibiting herbicides, wherein the plant or plant part further exhibits a second or third herbicide-tolerant trait.

16. A method for producing a plant product from the plant of claim 1, the method comprising processing the plant or a plant part thereof to obtain the plant product.

17. The method of claim 16, wherein the plant product is fodder, seed meal, oil, or seed-treatment-coated seeds.

18. A plant product obtained from a plant or plant part thereof, wherein the plant or plant part comprises in at least some of its cells a polynucleotide operably linked to a promoter operable in plant cells, the promoter capable of expressing a mutated CESA polypeptide encoded by the polynucleotide, the expression of the mutated CESA polypeptide conferring to the plant tolerance to CESA-inhibiting herbicides, wherein the plant or plant part further exhibits a second or third herbicide-tolerant trait.

19. The plant product of claim 18, wherein the product is fodder, seed meal, oil, or seed-treatment-coated seed.
